(19) United States
(12) Patent Application Publication
(10) Pub. No.: US 2023/0167454 A1
(43) Pub. Date: Jun. 1, 2023

(54) PROGRAMMABLE NUCLEASES AND METHODS OF USE

(71) Applicant: Mammoth Biosciences, Inc., Brisbane, CA (US)

(72) Inventors: Lucas Benjamin HARRINGTON, San Francisco, CA (US); William Douglass WRIGHT, Fairfield, CA (US); Pei-Qi LIU, Oakland, CA (US); Benjamin Julius RAUCH, Oakland, CA (US); Wiputra Jaya HARTONO, San Francisco, CA (US); Bridget Ann Paine MCKAY, Portola Valley, CA (US); Danuta Sastre PHIPPS, San Mateo, CA (US); Yuxuan ZHENG, San Jose, CA (US); Nerea SANVISENS, San Francisco, CA (US); Sean CHEN, Berkeley, CA (US); David PAEZ-ESPINO, Concord, CA (US)

(21) Appl. No.: 17/819,137

(22) Filed: Aug. 11, 2022

Related U.S. Application Data
(63) Continuation of application No. PCT/US2021/035781, filed on Jun. 3, 2021.
(60) Provisional application No. 63/034,346, filed on Jun. 3, 2020.
(60) Provisional application No. 63/037,535, filed on Jun. 10, 2020.
(60) Provisional application No. 63/040,998, filed on Jun. 18, 2020.
(60) Provisional application No. 63/092,481, filed on Oct. 15, 2020.
(60) Provisional application No. 63/116,083, filed on Nov. 19, 2020.
(60) Provisional application No. 63/124,676, filed on Dec. 11, 2020.
(60) Provisional application No. 63/156,883, filed on Mar. 4, 2021.
(60) Provisional application No. 63/178,472, filed on Apr. 22, 2021.

(51) Int. Cl. C12N 15/52; C12N 15/86

(52) U.S. Cl. CPC C12N 15/52; C12N 15/86; C12N 2310/30; C12N 2750/14143

(57) ABSTRACT

Provided herein, in certain embodiments, are programmable nucleases, guide nucleic acids, and complexes thereof. Certain programmable nucleases provided herein comprise a RuvC domain. Also provided herein are nucleic acids encoding said programmable nucleases and guide nucleic acids. Also provided herein are methods of genome editing, methods of regulating gene expression, and methods of detecting nucleic acids with said programmable nucleases and guide nucleic acids.

### CROSS-REFERENCE

[0001] The present application is a continuation of International Patent Application No. PCT/US2021/035781, filed Jun. 3, 2021, which claims priority to and benefit from U.S. Provisional Application No. 63/034,346, filed on Jun. 3, 2020, U.S. Provisional Application No. 63/037,535, filed on Jun. 10, 2020, U.S. Provisional Application No. 63/040,998, filed on Jun. 18, 2020, U.S. Provisional Application No. 63/092,481, filed on Oct. 15, 2020, U.S. Provisional Application No. 63/116,083, filed on Nov. 19, 2020, U.S. Provisional Application No. 63/124,676, filed on Dec. 11, 2020, U.S. Provisional Application No. 63/156,883, filed on Mar. 4, 2021, and U.S. Provisional Application No. 63/178,472, filed on Apr. 22, 2021, the entire contents of each of which are herein incorporated by reference.

### SEQUENCE LISTING

[0002] This application incorporates by reference a Sequence Listing XML submitted via the USPTO patent electronic filing system. The Sequence Listing XML, entitled 203477-734301US_Sequence_Listing.xml, was created on Aug. 1, 2022, and is 3,349,159 bytes in size.

### BACKGROUND

[0003] Certain programmable nucleases can be used for genome editing of nucleic acid sequences or detection of nucleic acid sequences. There is a need for high efficiency, programmable nucleases that are capable of working under various sample conditions and can be used for both genome editing and diagnostics.

### SUMMARY

[0004] In various aspects, the present disclosure provides a composition comprising: a) a programmable CasΦ nuclease or a nucleic acid encoding said programmable CasΦ nuclease, wherein said programmable CasΦ nuclease comprises at least 85% sequence identity to a sequence selected from the group consisting of SEQ ID NOs: 1 to 47, SEQ ID NO. 105, and SEQ ID NO. 107, and b) a guide nucleic acid or a nucleic acid encoding said guide nucleic acid, wherein said guide nucleic acid comprises a region comprising a nucleotide sequence that is complementary to a target nucleic acid sequence and an additional region, wherein said region and said additional region are heterologous to each other.

[0005] In some aspects, the additional region of the guide nucleic acid comprises at least 85% sequence identity to a sequence selected from the group consisting of SEQ ID NOs: 48 to 86. In some aspects, the guide nucleic acid comprises a sequence comprising at least 95% sequence identity to a sequence selected from the group consisting of SEQ ID NOs: 48 to 86. In some aspects, the guide nucleic acid comprises a sequence selected from the group consisting of SEQ ID NOs: 48 to 86. In some aspects, the programmable CasΦ nuclease comprises nickase activity. In some aspects, the programmable CasΦ nuclease comprises double-strand cleavage activity. In some aspects, the programmable CasΦ nuclease comprises at least 90% sequence identity to a sequence selected from the group consisting of SEQ ID NOs: 1 to 47, SEQ ID NO. 105, and SEQ ID NO. 107.

[0006] In some aspects, the programmable CasΦ nuclease comprises at least 95% sequence identity to a sequence selected from the group consisting of SEQ ID NOs: 1 to 47, SEQ ID NO. 105, and SEQ ID NO. 107. In some aspects, the programmable CasΦ nuclease comprises at least 98% sequence identity to a sequence selected from the group consisting of SEQ ID NOs: 1 to 47, SEQ ID NO. 105, and SEQ ID NO. 107. In some aspects, the programmable CasΦ nuclease comprises a sequence selected from the group consisting of SEQ ID NOs: 1 to 47, SEQ ID NO. 105, and SEQ ID NO. 107. In some aspects, the guide nucleic acid does not comprise a tracrRNA. In some aspects, the programmable CasΦ nuclease does not require a tracrRNA. In some aspects, the programmable CasΦ nuclease comprises greater nickase activity when complexed with the guide nucleic acid at a temperature from about 20° C. to about 25° C., as compared with complex formation at a temperature of about 37° C. In some aspects, the guide nucleic acid comprises at least 98% sequence identity to SEQ ID NO: 54. In some aspects, the guide nucleic acid comprises at least 98% sequence identity to SEQ ID NO: 57. In some aspects, the programmable CasΦ nuclease comprises greater nickase activity when complexed with the guide nucleic acid comprising a sequence comprising at least 98% sequence identity to SEQ ID NO: 57, as compared to when complexed with a guide nucleic acid comprising SEQ ID NO: 49.

[0007] In some aspects, the programmable CasΦ nuclease exhibits greater nicking activity as compared to double stranded cleavage activity. In some aspects, the programmable CasΦ nuclease exhibits greater double stranded cleavage activity as compared to nicking activity. In some aspects, the programmable CasΦ nuclease comprises a single active site in a RuvC domain that is capable of catalyzing pre-crRNA processing and nicking or cleaving of nucleic acids. In some aspects, the programmable CasΦ nuclease recognizes a protospacer adjacent motif (PAM) of 5′-TBN-3′, wherein B is one or more of C, G, or, T. In some aspects, the programmable CasΦ nuclease recognizes a protospacer adjacent motif (PAM) of 5′-TTTN-3′.

[0008] In various aspects, the present disclosure provides a method of modifying a target nucleic acid sequence, the method comprising: contacting a target nucleic acid sequence with a programmable CasΦ nuclease comprising at least 85% sequence identity to a sequence selected from the group consisting of SEQ ID NOs: 1 to 47, SEQ ID NO. 105, and SEQ ID NO. 107, and a guide nucleic acid, wherein the programmable CasΦ nuclease cleaves the target nucleic acid sequence, thereby modifying the target nucleic acid sequence.

[0009] In some aspects, the programmable CasΦ nuclease introduces a double-stranded break in the target nucleic acid sequence. In some aspects, the programmable CasΦ nuclease comprises double-strand cleavage activity. In some aspects, the programmable CasΦ nuclease cleaves a single-strand of the target nucleic acid sequence. In some aspects, the programmable CasΦ nuclease comprises nickase activity. In some aspects, the programmable CasΦ nuclease exhibits greater nicking activity as compared to double stranded cleavage activity. In some aspects, the programmable CasΦ nuclease exhibits greater double stranded cleavage activity as compared to nicking activity. In some aspects, the target nucleic acid is DNA. In some aspects, the target nucleic acid is double-stranded DNA. In some aspects, the programmable CasΦ nuclease cleaves a non-target strand of the double-stranded DNA, wherein the non-target strand is non-complementary to the guide nucleic acid. In some aspects, the programmable CasΦ nuclease does not cleave a target strand of the double-stranded DNA, wherein the target strand is complementary to the guide nucleic acid.

[0010] In some aspects, the programmable CasΦ nuclease comprises at least 90% sequence identity to a sequence selected from the group consisting of SEQ ID NOs: 1 to 47, SEQ ID NO. 105, and SEQ ID NO. 107. In some aspects, the programmable CasΦ nuclease comprises at least 95% sequence identity to a sequence selected from the group consisting of SEQ ID NOs: 1 to 47, SEQ ID NO. 105, and SEQ ID NO. 107. In some aspects, the programmable CasΦ nuclease comprises at least 98% sequence identity to a sequence selected from the group consisting of SEQ ID NOs: 1 to 47, SEQ ID NO. 105, and SEQ ID NO. 107. In some aspects, the programmable CasΦ nuclease comprises a sequence selected from the group consisting of SEQ ID NOs: 1 to 47, SEQ ID NO. 105, and SEQ ID NO. 107. In some aspects, the guide nucleic acid comprises a sequence comprising at least 85% sequence identity to a sequence selected from the group consisting of SEQ ID NOs: 48 to 86. In some aspects, the guide nucleic acid comprises a sequence comprising at least 95% sequence identity to a sequence selected from the group consisting of SEQ ID NOs: 48 to 86. In some aspects, the guide nucleic acid comprises a sequence selected from the group consisting of SEQ ID NOs: 48 to 86.

[0011] In some aspects, the guide nucleic acid does not comprise a tracrRNA. In some aspects, the target nucleic acid sequence comprises a mutated sequence or a sequence associated with a disease. In some aspects, the mutated sequence is removed after the programmable CasΦ nuclease cleaves the target nucleic acid sequence. In some aspects, the target nucleic acid sequence is in a human cell. In some aspects, the method is performed in vivo. In some aspects, the method is performed ex vivo. In some aspects, the method further comprises inserting a donor polynucleotide into the target nucleic acid sequence at the site of cleavage.

[0012] In various aspects, the present disclosure provides a method of introducing a break in a target nucleic acid, the method comprising: contacting the target nucleic acid with: (a) a first guide nucleic acid comprising a region that binds to a first programmable nickase comprising at least 85% sequence identity to a sequence selected from the group consisting of SEQ ID NOs: 1 to 47, SEQ ID NO. 105, and SEQ ID NO. 107; and (b) a second guide nucleic acid comprising a region that binds to a second programmable nickase comprising at least 85% sequence identity to a sequence selected from the group consisting of SEQ ID NOs: 1 to 47, SEQ ID NO. 105, and SEQ ID NO. 107, wherein the first guide nucleic acid comprises a first additional region that binds to the target nucleic acid and wherein the second guide nucleic acid comprises a second additional region that binds to the target nucleic acid and wherein the first additional region of the first guide nucleic acid and the second additional region of the second guide nucleic acid bind opposing strands of the target nucleic acid. In some aspects, the first programmable nickase, the second programmable nickase, or both comprise at least 90% sequence identity to a sequence selected from the group consisting of SEQ ID NOs: 1 to 47, SEQ ID NO. 105, and SEQ ID NO. 107.

[0013] In some aspects, the first programmable nickase, the second programmable nickase, or both comprise at least 95% sequence identity to a sequence selected from the group consisting of SEQ ID NOs: 1 to 47, SEQ ID NO. 105, and SEQ ID NO. 107. In some aspects, the first programmable nickase, the second programmable nickase, or both comprise a sequence selected from the group consisting of SEQ ID NOs: 1 to 47, SEQ ID NO. 105, and SEQ ID NO. 107. In some aspects, the first guide nucleic acid, the second guide nucleic acid, or both comprise a sequence comprising at least 85% sequence identity to a sequence selected from the group consisting of SEQ ID NOs: 48 to 86. In some aspects, the first guide nucleic acid, the second guide nucleic acid, or both comprise a sequence comprising at least 95% sequence identity to a sequence selected from the group consisting of SEQ ID NOs: 48 to 86. In some aspects, the first guide nucleic acid, the second guide nucleic acid, or both comprise a sequence selected from the group consisting of SEQ ID NOs: 48 to 86.

[0014] In some aspects, the first programmable nickase and the second programmable nickase exhibit greater nicking activity as compared to double stranded cleavage activity. In some aspects, the first programmable nickase and the second programmable nickase nick the target nucleic acid at two different sites. In some aspects, the target nucleic acid comprises double stranded DNA. In some aspects, the two different sites are on opposing strands of the double stranded DNA. In some aspects, the target nucleic acid comprises a mutated sequence or a sequence is associated with a disease. In some aspects, the mutated sequence is removed after the first programmable nickase and the second programmable nickase nick the target nucleic acid. In some aspects, the target nucleic acid is in a cell. In some aspects, the method is performed in vivo. In some aspects, the method is performed ex vivo. In some aspects, the first programmable nickase and the second programmable nickase are the same. In some aspects, the first programmable nickase and the second programmable nickase are different.

[0015] In various aspects, the present disclosure provides a method of detecting a target nucleic acid in a sample, the method comprising contacting a sample comprising a target nucleic acid with (a) a programmable CasΦ nuclease comprising at least 85% sequence identity to a sequence selected from the group consisting of SEQ ID NOs: 1 to 47, SEQ ID NO. 105, and SEQ ID NO. 107; (b) a guide RNA comprising a region that binds to the programmable CasΦ nuclease and an additional region that binds to the target nucleic acid; and (c) a labeled single stranded DNA reporter that does not bind the guide RNA; cleaving the labeled single stranded DNA reporter by the programmable CasΦ nuclease to release a detectable label; and detecting the target nucleic acid by measuring a signal from the detectable label.

[0016] In some aspects, the target nucleic acid is single stranded DNA. In some aspects, the target nucleic acid is double stranded DNA. In some aspects, the target nucleic acid is a viral nucleic acid. In some aspects, the target nucleic acid is bacterial nucleic acid. In some aspects, the target nucleic acid is from a human cell. In some aspects, the target nucleic acid is a fetal nucleic acid. In some aspects, the sample is derived from a subject's saliva, blood, serum, plasma, urine, aspirate, or biopsy sample. In some aspects, the programmable CasΦ nuclease comprises at least 95% sequence identity to a sequence selected from the group consisting of SEQ ID NOs: 1 to 47, SEQ ID NO. 105, and SEQ ID NO. 107. In some aspects, the programmable CasΦ nuclease comprises a sequence selected from the group consisting of SEQ ID NOs: 1 to 47, SEQ ID NO. 105, and SEQ ID NO. 107.

[0017] In some aspects, the guide RNA comprises at least about 95% sequence identity to a sequence selected from the group consisting of SEQ ID NOs: 48 to 86. In some aspects, the guide RNA comprises a sequence selected from the group consisting of SEQ ID NOs: 48 to 86. In some aspects, the sample comprises a phosphate buffer, a Tris buffer, or a HEPES buffer. In some aspects, the sample comprises a pH of 7 to 9. In some aspects, the sample comprises a pH of 7.5 to 8. In some aspects, the sample comprises a salt concentration of 25 nM to 200 mM. In some aspects, the single stranded DNA reporter comprises an ssDNA-fluorescence quenching DNA reporter. In some aspects, the ssDNA-fluorescence quenching DNA reporter is a universal ssDNA-fluorescence quenching DNA reporter. In some aspects, the programmable CasΦ nuclease exhibits PAM-independent cleaving.

[0018] In various aspects, the present disclosure provides a method of modulating transcription of a gene in a cell, the method comprising: introducing into a cell comprising a target nucleic acid sequence: (i) a fusion polypeptide or a nucleic acid encoding the fusion polypeptide, wherein the fusion polypeptide comprises: (a) a dCasΦ polypeptide comprising at least 85% sequence identity to a sequence selected from the group consisting of SEQ ID NOs: 1 to 47, SEQ ID NO. 105, and SEQ ID NO. 107, wherein the dCasΦ polypeptide is enzymatically inactive; and (b) a polypeptide comprising transcriptional regulation activity; and (ii) a guide nucleic acid, or a nucleic acid comprising a nucleotide sequence encoding the guide nucleic acid, wherein the guide nucleic acid comprises a region that binds to the dCasΦ polypeptide and an additional region that binds to the target nucleic acid; wherein transcription of the gene is modulated through the fusion polypeptide acting on the target nucleic acid sequence.

[0019] In some aspects, the dCasΦ polypeptide comprises at least 95% sequence identity to a sequence selected from the group consisting of SEQ ID NOs: 1 to 47, SEQ ID NO. 105, and SEQ ID NO. 107. In some aspects, the guide nucleic acid comprises at least about 95% sequence identity to a sequence selected from the group consisting of SEQ ID NOs: 48 to 86. In some aspects, the guide nucleic acid comprises a sequence selected from the group consisting of SEQ ID NOs: 48 to 86. In some aspects, the guide nucleic acid comprises a sequence selected from the group consisting of SEQ ID NOs: 48 to 86. In some aspects, the polypeptide comprising transcriptional regulation activity polypeptide comprises transcription activation activity.

[0020] In some aspects, the polypeptide comprising transcriptional regulation activity polypeptide comprises transcription repressor activity. In some aspects, the polypeptide comprising transcriptional regulation activity polypeptide comprises an activity selected from the group consisting of transcription activation activity, transcription repression activity, nuclease activity, transcription release factor activity, histone modification activity, histone acetyltransferase activity, nucleic acid association activity, DNA methylase activity, direct or indirect DNA demethylase activity, methyltransferase activity, demethylase activity, acetyltransferase activity, deacetylase activity, kinase activity, phosphatase activity, ubiquitin ligase activity, deubiquitinating activity, adenylation activity, deadenylation activity, deaminase activity, SUMOylating activity, deSUMOylating activity, ribosylation activity, deribosylation activity, myristoylation activity, and demyristoylation activity.

[0021] In various aspects, the present disclosure provides a composition comprising: a) a Cas nuclease or nucleic acid encoding said Cas nuclease, and b) a guide nucleic acid or a nucleic acid encoding said guide nucleic acid, wherein said guide nucleic acid comprises a region comprising a nucleotide sequence that is complementary to a target nucleic acid sequence and an additional region, wherein said region and said additional region are heterologous to each other; wherein the Cas nuclease comprises a RuvC domain, wherein the RuvC domain is capable of processing a pre-crRNA and cleaving a target nucleic acid. In some aspects, the same active site in the RuvC domain catalyzes the processing of the pre-crRNA and the cleaving of the target nucleic acid. In some aspects, the Cas nuclease is the programmable CasΦ nuclease as disclosed herein. In some aspects, the Cas nuclease recognizes a protospacer adjacent motif (PAM) of 5′-TBN-3′, wherein B is one or more of C, G, or, T. In some aspects, the Cas nuclease recognizes a protospacer adjacent motif (PAM) of 5′-TTTN-3′. In some aspects, the Cas nuclease recognizes a protospacer adjacent motif (PAM) of 5′-TTN-3′. In some aspects, the Cas nuclease recognizes a protospacer adjacent motif (PAM) of 5′-GTTB-3′, wherein B is C, G, or T. In some aspects, the Cas nuclease recognizes a protospacer adjacent motif (PAM) of 5′-GTTK-3′, 5′-VTTK-3′, 5′-VTTS-3′, 5′-TTTS-3′ or 5′-VTTN-3′, where K is G or T, V is A, C or G, and S is C or G. In some aspects, the composition is used in any of the above methods.

[0022] In various aspects, the present disclosure provides the use of a programmable CasΦ nuclease to modify a target nucleic acid sequence according to any one of the above methods. In various aspects, the present disclosure provides the use of a first programmable nickase and a second programmable nickase to introduce a break in a target nucleic acid according to any one of the above methods. In various aspects, the present disclosure provides the use of a programmable CasΦ nuclease to detect a target nucleic acid in a sample according to any one of the above methods. In various aspects, the present disclosure provides the use of a dCasΦ polypeptide to modulate transcription of a gene in a cell according to any one of the above methods. In some aspects, the region is a spacer region and the additional region is a repeat region. In some aspects, the region is a repeat region and the additional region is a spacer region. In some aspects, the repeat region comprises a GAC sequence, optionally wherein the GAC sequence is at the 3′ end of the repeat region. In some aspects, the repeat region comprises a hairpin, optionally wherein the hairpin is in the 3′ portion of the repeat region. In some aspects, the hairpin comprises a double-stranded stem portion and a single-stranded loop portion. In some aspects, a strand of the stem portion comprises a CYC sequence and the other strand of the stem portion comprises a GRG sequence, wherein Y and R are complementary. In some aspects, the G of the GAC sequence is in the stem portion of the hairpin. In some aspects, each strand of the stem portion comprises 3, 4 or 5 nucleotides. In some aspects, the loop portion comprises between 2 and 8 nucleotides, optionally wherein the loop portion comprises 4 nucleotides. In some aspects, the guide nucleic acid comprises at least 98% sequence identity to SEQ ID NO: 54.

[0023] In some aspects, the repeat region is between 15 and 50 nucleotides in length, preferably, wherein the repeat region is between 19 and 37 nucleotides in length. In some aspects, the spacer region is between 15 and 50 nucleotides in length, between 15 and 40 nucleotides in length, or between 15 and 35 nucleotides in length, preferably wherein the spacer region is between 16 and 30 nucleotides in length. In some aspects, the spacer region is between 16 and 20 nucleotides in length. In some aspects, the programmable CasΦ nuclease forms a complex with a divalent metal ion, preferably wherein the divalent metal ion is Mg2+.

[0024] In various aspects, the present disclosure provides a programmable CasΦ nuclease or a nucleic acid encoding said programmable CasΦ nuclease, wherein said programmable CasΦ nuclease comprises at least 85% sequence identity to a sequence selected from the group consisting of SEQ ID NOs: 1 to 47, SEQ ID NO. 105, and SEQ ID NO. 107, and wherein the programmable CasΦ nuclease is capable of binding to a guide RNA comprising a first region that is complementary to a target nucleic acid sequence in a eukaryotic genome and a second region that binds to the programmable CasΦ nuclease; a complex comprising the programmable CasΦ nuclease and the guide RNA binds to the target sequence; the programmable CasΦ nuclease comprises a RuvC domain, wherein the RuvC domain is capable of processing a pre-crRNA and cleaving the target nucleic acid; and the programmable CasΦ nuclease does not require a tracrRNA to cleave the target nucleic acid.

[0025] In various aspects, the present disclosure provides a programmable CasΦ nuclease or a nucleic acid encoding said programmable CasΦ nuclease, wherein said programmable CasΦ nuclease comprises a RuvC-like domain which matches PFAM family PF07282 and does not match PFAM family PF18516, and wherein the programmable CasΦ nuclease is capable of binding to a guide RNA comprising a first region that is complementary to a target nucleic acid sequence in a eukaryotic genome and a second region that binds to the programmable CasΦ nuclease; a complex comprising the programmable CasΦ nuclease and the guide RNA binds to the target sequence; the RuvC-like domain is capable of processing a pre-crRNA and cleaving the target nucleic acid; and the programmable CasΦ nuclease does not require a tracrRNA to cleave the target nucleic acid.

[0026] In various aspects, the present disclosure provides a programmable CasΦ nuclease or a nucleic acid encoding said programmable CasΦ nuclease, wherein said programmable CasΦ nuclease comprises at least 85% sequence identity to a sequence selected from the group consisting of SEQ ID NOs: 1 to 47, SEQ ID NO. 105, or SEQ ID NO. 107, and wherein a) the programmable CasΦ nuclease comprises a RuvC-like domain which matches PFAM family PF07282 and does not match PFAM family PF18516; b) the programmable CasΦ nuclease is capable of binding to a guide RNA comprising a first region that is complementary to a target nucleic acid sequence in a eukaryotic genome and a second region that binds to the programmable CasΦ nuclease; c) a complex comprising the programmable CasΦ nuclease and the guide RNA binds to the target sequence; d) the RuvC-like domain is capable of processing a pre-crRNA and cleaving the target nucleic acid; and e) the programmable CasΦ nuclease does not require a tracrRNA to cleave the target nucleic acid.

[0027] In some aspects, the same active site in the RuvC domain or RuvC-like domain catalyzes the processing of the pre-crRNA and the cleaving of the target nucleic acid. In some aspects, the programmable CasΦ nuclease is fused or linked to one or more NLS. In some aspects, the one or more NLS are fused or linked to the N-terminus of the programmable CasΦ nuclease; the one or more NLS are fused or linked to the C-terminus of the programmable CasΦ nuclease; or the one or more NLS are fused or linked to the N-terminus and the C-terminus of the programmable CasΦ nuclease. In some cases, an aspect comprises the programmable CasΦ nuclease or a nucleic acid described herein and a gRNA comprising a first region that is complementary to a target nucleic acid sequence in a eukaryotic genome and a second region that binds to the programmable CasΦ nuclease.

[0028] In some cases, an aspect comprises the programmable CasΦ nuclease or a nucleic acid described herein and a cell, preferably wherein the cell is a eukaryotic cell. In some cases, an aspect comprises the programmable CasΦ nuclease or a nucleic acid described herein and a gRNA comprising a first region that is complementary to a target nucleic acid sequence in a eukaryotic genome and a second region that binds to the programmable CasΦ nuclease and a cell, preferably wherein the cell is a eukaryotic cell. In some cases, an aspect comprises a eukaryotic cell comprising the programmable CasΦ nuclease or a nucleic acid described herein.

[0029] In some aspects, the cell further comprises a gRNA comprising a first region that is complementary to a target nucleic acid sequence in a eukaryotic genome and a second region that binds to the programmable CasΦ nuclease and a cell, preferably wherein the cell is a eukaryotic cell.

[0030] In some cases, an aspect comprises a vector comprising a nucleic acid described herein. In some aspects, the vector is a viral vector.

[0031] In some aspects, the programmable CasΦ nuclease recognizes a protospacer adjacent motif (PAM) of 5′-TTN-3′. In some aspects, the programmable CasΦ nuclease recognizes a protospacer adjacent motif (PAM) of 5′-GTTB-3′, wherein B is C, G, or T. In some aspects, the Cas nuclease recognizes a protospacer adjacent motif (PAM) of 5′-TTN-3′, optionally wherein the PAM is 5′-TTN-3′. In some aspects, the Cas nuclease recognizes a protospacer adjacent motif (PAM) of 5′-GTTK-3′, 5′-VTTK-3′, 5′-VTTS-3′, 5′-TTTS-3′ or 5′-VTTN-3′, where K is G or T, V is A, C or G, and S is C or G. In some aspects, the Cas nuclease recognizes a protospacer adjacent motif (PAM) of 5′-GTTB-3′, wherein B is C, G, or T.

[0032] In various aspects, the present disclosure provides a programmable CasΦ nuclease or a nucleic acid encoding said programmable CasΦ nuclease, wherein said programmable CasΦ nuclease comprises at least 85% sequence identity to a sequence selected from the group consisting of SEQ ID NOs: 1 to 47, SEQ ID NO. 105, and SEQ ID NO. 107, and wherein the programmable CasΦ nuclease is capable of binding to a guide RNA comprising a first region that is complementary to a target nucleic acid sequence in a eukaryotic genome and a second region that binds to the programmable CasΦ nuclease; a complex comprising the programmable CasΦ nuclease and the guide RNA binds to the target sequence; the programmable CasΦ nuclease comprises a RuvC domain, wherein the RuvC domain is capable of processing a pre-crRNA and cleaving the target nucleic acid; the programmable CasΦ nuclease cleaves both strands of the target nucleic acid comprising the target sequence, wherein the strand break is a staggered cut with a 5′ overhang; and the programmable CasΦ nuclease does not require a tracrRNA to cleave the target nucleic acid.

[0033] In various aspects, the present disclosure provides a programmable CasΦ nuclease or a nucleic acid encoding said programmable CasΦ nuclease, wherein said programmable CasΦ nuclease comprises a RuvC-like domain which matches PFAM family PF07282 and does not match PFAM family PF18516, and wherein the programmable CasΦ nuclease is capable of binding to a guide RNA comprising a first region that is complementary to a target nucleic acid sequence in a eukaryotic genome and a second region that binds to the programmable CasΦ nuclease; a complex comprising the programmable CasΦ nuclease and the guide RNA binds to the target sequence; the RuvC-like domain is capable of processing a pre-crRNA and cleaving the target nucleic acid; the programmable CasΦ nuclease cleaves both strands of the target nucleic acid comprising the target sequence, wherein the strand break is a staggered cut with a 5′ overhang; and the programmable CasΦ nuclease does not require a tracrRNA to cleave the target nucleic acid.

[0034] In various aspects, the present disclosure provides a programmable nuclease or a nucleic acid encoding said programmable nuclease, wherein said programmable nuclease is a Type V CRISPR/Cas enzyme nuclease and comprises between 400 and 900 amino acids, and wherein the programmable CasΦ nuclease is capable of binding to a guide RNA comprising a first region that is complementary to a target nucleic acid sequence in a eukaryotic genome and a second region that binds to the programmable CasΦ nuclease; a complex comprising the programmable CasΦ nuclease and the guide RNA binds to the target sequence; the programmable CasΦ nuclease comprises a RuvC domain, wherein the RuvC domain is capable of processing a pre-crRNA and cleaving the target nucleic acid; the programmable CasΦ nuclease cleaves both strands of the target nucleic acid comprising the target sequence, wherein the strand break is a staggered cut with a 5′ overhang; and the programmable CasΦ nuclease does not require a tracrRNA to cleave the target nucleic acid.

[0035] In various aspects, the present disclosure provides a programmable CasΦ nuclease or a nucleic acid encoding said programmable CasΦ nuclease, wherein said programmable CasΦ nuclease comprises at least 85% sequence identity to a sequence selected from the group consisting of SEQ ID NOs: 1 to 47, SEQ ID NO. 105, and SEQ ID NO. 107, and wherein the programmable CasΦ nuclease is capable of binding to a guide RNA comprising a first region that is complementary to a target nucleic acid sequence in a eukaryotic genome and a second region that binds to the programmable CasΦ nuclease; a complex comprising the programmable CasΦ nuclease and the guide RNA binds to the target sequence; the programmable CasΦ nuclease comprises a RuvC domain, wherein the RuvC domain is capable of processing a pre-crRNA and cleaving the target nucleic acid; the programmable CasΦ nuclease is capable of cleaving the second region of the guide RNA in mammalian cells; and the programmable CasΦ nuclease does not require a tracrRNA to cleave the target nucleic acid.

[0036] In various aspects, the present disclosure provides a programmable CasΦ nuclease or a nucleic acid encoding said programmable CasΦ nuclease, wherein said programmable CasΦ nuclease comprises a RuvC-like domain which matches PFAM family PF07282 and does not match PFAM family PF18516, and wherein the programmable CasΦ nuclease is capable of binding to a guide RNA comprising a first region that is complementary to a target nucleic acid sequence in a eukaryotic genome and a second region that binds to the programmable CasΦ nuclease; a complex comprising the programmable CasΦ nuclease and the guide RNA binds to the target sequence; the RuvC-like domain is capable of processing a pre-crRNA and cleaving the target nucleic acid; the programmable CasΦ nuclease is capable of cleaving the second region of the guide RNA in mammalian cells; and the programmable CasΦ nuclease does not require a tracrRNA to cleave the target nucleic acid.

[0037] In various aspects, the present disclosure provides a programmable nuclease or a nucleic acid encoding said programmable nuclease, wherein said programmable nuclease is a Type V CRISPR/Cas enzyme nuclease and comprises between 400 and 900 amino acids, and wherein the programmable CasΦ nuclease is capable of binding to a guide RNA comprising a first region that is complementary to a target nucleic acid sequence in a eukaryotic genome and a second region that binds to the programmable CasΦ nuclease; a complex comprising the programmable CasΦ nuclease and the guide RNA binds to the target sequence; the RuvC-like domain is capable of processing a pre-crRNA and cleaving the target nucleic acid; the programmable CasΦ nuclease is capable of cleaving the second region of the guide RNA in mammalian cells; and the programmable CasΦ nuclease does not require a tracrRNA to cleave the target nucleic acid.

[0038] In various aspects, the present disclosure provides a programmable CasΦ nuclease or a nucleic acid encoding said programmable CasΦ nuclease, wherein said programmable CasΦ nuclease comprises at least 85% sequence identity to a sequence selected from the group consisting of SEQ ID NOs: 1 to 47, SEQ ID NO. 105, and SEQ ID NO. 107, and wherein the programmable CasΦ nuclease is capable of binding to a guide RNA comprising a first region that is complementary to a target nucleic acid sequence in a eukaryotic genome and a second region that binds to the programmable CasΦ nuclease; a complex comprising the programmable CasΦ nuclease and the guide RNA binds to the target sequence; the programmable CasΦ nuclease comprises a RuvC domain, wherein the RuvC domain is capable of processing a pre-crRNA and cleaving the target nucleic acid; the programmable CasΦ nuclease cleaves both strands of a target nucleic acid comprising the target sequence, wherein the strand break is a staggered cut with a 5′ overhang; the programmable CasΦ nuclease is capable of cleaving the second region of the guide RNA in mammalian cells; and the programmable CasΦ nuclease does not require a tracrRNA to cleave the target nucleic acid.

[0039] In various aspects, the present disclosure provides a programmable CasΦ nuclease or a nucleic acid encoding said programmable CasΦ nuclease, wherein said programmable CasΦ nuclease comprises a RuvC-like domain which matches PFAM family PF07282 and does not match PFAM family PF18516, and wherein the programmable CasΦ nuclease is capable of binding to a guide RNA comprising a first region that is complementary to a target nucleic acid sequence in a eukaryotic genome and a second region that binds to the programmable CasΦ nuclease; a complex comprising the programmable CasΦ nuclease and the guide RNA binds to the target sequence; the RuvC-like domain is capable of processing a pre-crRNA and cleaving the target nucleic acid; the programmable CasΦ nuclease cleaves both strands of a target nucleic acid comprising the target sequence, wherein the strand break is a staggered cut with a 5′ overhang; the programmable CasΦ nuclease is capable of cleaving the second region of the guide RNA in mammalian cells; and the programmable CasΦ nuclease does not require a tracrRNA to cleave the target nucleic acid.

[0040] In various aspects, the present disclosure provides a programmable nuclease or a nucleic acid encoding said programmable nuclease, wherein said programmable nuclease is a Type V CRISPR/Cas enzyme nuclease and comprises between 400 and 900 amino acids, and wherein the programmable CasΦ nuclease is capable of binding to a guide RNA comprising a first region that is complementary to a target nucleic acid sequence in a eukaryotic genome and a second region that binds to the programmable CasΦ nuclease; a complex comprising the programmable CasΦ nuclease and the guide RNA binds to the target sequence; the RuvC-like domain is capable of processing a pre-crRNA and cleaving the target nucleic acid; the programmable CasΦ nuclease cleaves both strands of a target nucleic acid comprising the target sequence, wherein the strand break is a staggered cut with a 5′ overhang; the programmable CasΦ nuclease is capable of cleaving the second region of the guide RNA in mammalian cells; and the programmable CasΦ nuclease does not require a tracrRNA to cleave the target nucleic acid.

[0041] In various aspects, the present disclosure provides a programmable CasΦ nuclease or a nucleic acid encoding said programmable CasΦ nuclease, wherein said programmable CasΦ nuclease comprises at least 85% sequence identity to a sequence selected from the group consisting of SEQ ID NOs: 1 to 47, SEQ ID NO. 105, and SEQ ID NO. 107, and wherein the programmable CasΦ nuclease is capable of binding to a guide RNA comprising a first region that is complementary to a target nucleic acid sequence in a eukaryotic genome and a second region that binds to the programmable CasΦ nuclease, wherein the first region comprises a seed region comprising between 10 and 16 nucleosides; a complex comprising the programmable CasΦ nuclease and the guide RNA binds to the target sequence; the programmable CasΦ nuclease comprises a RuvC domain, wherein the RuvC domain is capable of processing a pre-crRNA and cleaving the target nucleic acid; and the programmable CasΦ nuclease does not require a tracrRNA to cleave the target nucleic acid.

[0042] In various aspects, the present disclosure provides a programmable CasΦ nuclease or a nucleic acid encoding said programmable CasΦ nuclease, wherein said programmable CasΦ nuclease comprises a RuvC-like domain which matches PFAM family PF07282 and does not match PFAM family PF18516, and wherein the programmable CasΦ nuclease is capable of binding to a guide RNA comprising a first region that is complementary to a target nucleic acid sequence in a eukaryotic genome and a second region that binds to the programmable CasΦ nuclease, wherein the first region comprises a seed region comprising between 10 and 16 nucleosides; a complex comprising the programmable CasΦ nuclease and the guide RNA binds to the target sequence; the RuvC-like domain is capable of processing a pre-crRNA and cleaving the target nucleic acid; and the programmable CasΦ nuclease does not require a tracrRNA to cleave the target nucleic acid.

[0043] In various aspects, the present disclosure provides a programmable nuclease or a nucleic acid encoding said programmable nuclease, wherein said programmable nuclease is a Type V CRISPR/Cas enzyme nuclease and comprises between 400 and 900 amino acids, and wherein the programmable CasΦ nuclease is capable of binding to a guide RNA comprising a first region that is complementary to a target nucleic acid sequence in a eukaryotic genome and a second region that binds to the programmable CasΦ nuclease, wherein the first region comprises a seed region comprising between 10 and 16 nucleosides; a complex comprising the programmable CasΦ nuclease and the guide RNA binds to the target sequence; the RuvC-like domain is capable of processing a pre-crRNA and cleaving the target nucleic acid; and the programmable CasΦ nuclease does not require a tracrRNA to cleave the target nucleic acid.

[0044] In various aspects, the present disclosure provides a programmable CasΦ nuclease or a nucleic acid encoding said programmable CasΦ nuclease, wherein said programmable CasΦ nuclease comprises at least 85% sequence identity to a sequence selected from the group consisting of SEQ ID NOs: 1 to 47, SEQ ID NO. 105, and SEQ ID NO. 107, and wherein the programmable CasΦ nuclease is capable of binding to a guide RNA comprising a first region that is complementary to a target nucleic acid sequence in a eukaryotic genome and a second region that binds to the programmable CasΦ nuclease, wherein the first region comprises a seed region comprising between 10 and 16 nucleosides; a complex comprising the programmable CasΦ nuclease and the guide RNA binds to the target sequence; the programmable CasΦ nuclease comprises a RuvC domain, wherein the RuvC domain is capable of processing a pre-crRNA and cleaving the target nucleic acid; the programmable CasΦ nuclease cleaves both strands of the target nucleic acid comprising the target sequence, wherein the strand break is a staggered cut with a 5′ overhang; and the programmable CasΦ nuclease does not require a tracrRNA to cleave the target nucleic acid.

[0045] In various aspects, the present disclosure provides a programmable CasΦ nuclease or a nucleic acid encoding said programmable CasΦ nuclease, wherein said programmable CasΦ nuclease comprises a RuvC-like domain which matches PFAM family PF07282 and does not match PFAM family PF18516, and wherein the programmable CasΦ nuclease is capable of binding to a guide RNA comprising a first region that is complementary to a target nucleic acid sequence in a eukaryotic genome and a second region that binds to the programmable CasΦ nuclease, wherein the first region comprises a seed region comprising between 10 and 16 nucleosides; a complex comprising the programmable CasΦ nuclease and the guide RNA binds to the target sequence; the RuvC-like domain is capable of processing a pre-crRNA and cleaving the target nucleic acid; the programmable CasΦ nuclease cleaves both strands of the target nucleic acid comprising the target sequence, wherein the strand break is a staggered cut with a 5′ overhang; and the programmable CasΦ nuclease does not require a tracrRNA to cleave the target nucleic acid.

[0046] In various aspects, the present disclosure provides a programmable nuclease or a nucleic acid encoding said programmable nuclease, wherein said programmable nuclease is a Type V CRISPR/Cas enzyme nuclease and comprises between 400 and 900 amino acids, and wherein the programmable CasΦ nuclease is capable of binding to a guide RNA comprising a first region that is complementary to a target nucleic acid sequence in a eukaryotic genome and a second region that binds to the programmable CasΦ nuclease, wherein the first region comprises a seed region comprising between 10 and 16 nucleosides; a complex comprising the programmable CasΦ nuclease and the guide RNA binds to the target sequence; the RuvC-like domain is capable of processing a pre-crRNA and cleaving the target nucleic acid; the programmable CasΦ nuclease cleaves both strands of the target nucleic acid comprising the target sequence, wherein the strand break is a staggered cut with a 5′ overhang; and the programmable CasΦ nuclease does not require a tracrRNA to cleave the target nucleic acid.

[0047] In various aspects, the present disclosure provides a programmable CasΦ nuclease or a nucleic acid encoding said programmable CasΦ nuclease, wherein said programmable CasΦ nuclease comprises at least 85% sequence identity to a sequence selected from the group consisting of SEQ ID NOs: 1 to 47, SEQ ID NO. 105, and SEQ ID NO. 107, and wherein the programmable CasΦ nuclease is capable of binding to a guide RNA comprising a first region that is complementary to a target nucleic acid sequence in a eukaryotic genome and a second region that binds to the programmable CasΦ nuclease, wherein the first region comprises a seed region comprising between 10 and 16 nucleosides; a complex comprising the programmable CasΦ nuclease and the guide RNA binds to the target sequence; the programmable CasΦ nuclease comprises a RuvC domain, wherein the RuvC domain is capable of processing a pre-crRNA and cleaving the target nucleic acid; the programmable CasΦ nuclease is capable of cleaving the second region of the guide RNA in mammalian cells; and the programmable CasΦ nuclease does not require a tracrRNA to cleave the target nucleic acid.

[0048] In various aspects, the present disclosure provides a programmable CasΦ nuclease or a nucleic acid encoding said programmable CasΦ nuclease, wherein said programmable CasΦ nuclease comprises a RuvC-like domain which matches PFAM family PF07282 and does not match PFAM family PF18516, and wherein the programmable CasΦ nuclease is capable of binding to a guide RNA comprising a first region that is complementary to a target nucleic acid sequence in a eukaryotic genome and a second region that binds to the programmable CasΦ nuclease, wherein the first region comprises a seed region comprising between 10 and 16 nucleosides; a complex comprising the programmable CasΦ nuclease and the guide RNA binds to the target sequence; the RuvC-like domain is capable of processing a pre-crRNA and cleaving the target nucleic acid; the programmable CasΦ nuclease is capable of cleaving the second region of the guide RNA in mammalian cells; and the programmable CasΦ nuclease does not require a tracrRNA to cleave the target nucleic acid.

[0049] In various aspects, the present disclosure provides a programmable nuclease or a nucleic acid encoding said programmable nuclease, wherein said programmable nuclease is a Type V CRISPR/Cas enzyme nuclease and comprises between 400 and 900 amino acids, and wherein the programmable CasΦ nuclease is capable of binding to a guide RNA comprising a first region that is complementary to a target nucleic acid sequence in a eukaryotic genome and a second region that binds to the programmable CasΦ nuclease, wherein the first region comprises a seed region comprising between 10 and 16 nucleosides; a complex comprising the programmable CasΦ nuclease and the guide RNA binds to the target sequence; the RuvC-like domain is capable of processing a pre-crRNA and cleaving the target nucleic acid; the programmable CasΦ nuclease is capable of cleaving the second region of the guide RNA in mammalian cells; and the programmable CasΦ nuclease does not require a tracrRNA to cleave the target nucleic acid.

[0050] In various aspects, the present disclosure provides a programmable CasΦ nuclease or a nucleic acid encoding said programmable CasΦ nuclease, wherein said programmable CasΦ nuclease comprises at least 85% sequence identity to a sequence selected from the group consisting of SEQ ID NOs: 1 to 47, SEQ ID NO. 105, and SEQ ID NO. 107, and wherein the programmable CasΦ nuclease is capable of binding to a guide RNA comprising a first region that is complementary to a target nucleic acid sequence in a eukaryotic genome and a second region that binds to the programmable CasΦ nuclease, wherein the first region comprises a seed region comprising between 10 and 16 nucleosides; a complex comprising the programmable CasΦ nuclease and the guide RNA binds to the target sequence; the programmable CasΦ nuclease comprises a RuvC domain, wherein the RuvC domain is capable of processing a pre-crRNA and cleaving the target nucleic acid; the programmable CasΦ nuclease cleaves both strands of a target nucleic acid comprising the target sequence, wherein the strand break is a staggered cut with a 5′ overhang; the programmable CasΦ nuclease is capable of cleaving the second region of the guide RNA in mammalian cells; and the programmable CasΦ nuclease does not require a tracrRNA to cleave the target nucleic acid.

[0051] In various aspects, the present disclosure provides a programmable CasΦ nuclease or a nucleic acid encoding said programmable CasΦ nuclease, wherein said programmable CasΦ nuclease comprises a RuvC-like domain which matches PFAM family PF07282 and does not match PFAM family PF18516, and wherein the programmable CasΦ nuclease is capable of binding to a guide RNA comprising a first region that is complementary to a target nucleic acid sequence in a eukaryotic genome and a second region that binds to the programmable CasΦ nuclease, wherein the first region comprises a seed region comprising between 10 and 16 nucleosides; a complex comprising the programmable CasΦ nuclease and the guide RNA binds to the target sequence; the RuvC-like domain is capable of processing a pre-crRNA and cleaving the target nucleic acid; the programmable CasΦ nuclease cleaves both strands of a target nucleic acid comprising the target sequence, wherein the strand break is a staggered cut with a 5′ overhang; the programmable CasΦ nuclease is capable of cleaving the second region of the guide RNA in mammalian cells; and the programmable CasΦ nuclease does not require a tracrRNA to cleave the target nucleic acid.

[0052] In various aspects, the present disclosure provides a programmable nuclease or a nucleic acid encoding said programmable nuclease, wherein said programmable nuclease is a Type V CRISPR/Cas enzyme nuclease and comprises between 400 and 900 amino acids, and wherein the programmable CasΦ nuclease is capable of binding to a guide RNA comprising a first region that is complementary to a target nucleic acid sequence in a eukaryotic genome and a second region that binds to the programmable CasΦ nuclease, wherein the first region comprises a seed region comprising between 10 and 16 nucleosides; a complex comprising the programmable CasΦ nuclease and the guide RNA binds to the target sequence; the RuvC-like domain is capable of processing a pre-crRNA and cleaving the target nucleic acid; the programmable CasΦ nuclease cleaves both strands of a target nucleic acid comprising the target sequence, wherein the strand break is a staggered cut with a 5′ overhang; the programmable CasΦ nuclease is capable of cleaving the second region of the guide RNA in mammalian cells; and the programmable CasΦ nuclease does not require a tracrRNA to cleave the target nucleic acid. In some aspects the same active site in the RuvC domain or RuvC-like domain catalyzes the processing of the pre-crRNA and the cleaving of the target nucleic acid.

[0053] In some aspects, the programmable CasΦ nuclease is fused or linked to one or more NLS. In some aspects, the one or more NLS are fused or linked to the N-terminus of the programmable CasΦ nuclease; the one or more NLS are fused or linked to the C-terminus of the programmable CasΦ nuclease; or the one or more NLS are fused or linked to the N-terminus and the C-terminus of the programmable CasΦ nuclease.

[0054] In some cases, an aspect comprises the programmable CasΦ nuclease or a nucleic acid described herein and a gRNA comprising a first region that is complementary to a target nucleic acid sequence in a eukaryotic genome and a second region that binds to the programmable CasΦ nuclease. In some aspects, the first region comprises a seed region comprising between 10 and 16 nucleosides. In some aspects, the seed region comprises 16 nucleosides. In some cases, an aspect comprises the programmable CasΦ nuclease or a nucleic acid described herein and a cell, preferably wherein the cell is a eukaryotic cell.

[0055] In some cases, an aspect comprises the programmable CasΦ nuclease or a nucleic acid described herein and a gRNA comprising a first region that is complementary to a target nucleic acid sequence in a eukaryotic genome and a second region that binds to the programmable CasΦ nuclease and a cell, preferably wherein the cell is a eukaryotic cell. In some aspects, the first region comprises a seed region comprising between 10 and 16 nucleosides. In some aspects, the seed region comprises 16 nucleosides.

[0056] In some aspects, a eukaryotic cell comprises the programmable CasΦ nuclease or a nucleic acid described herein. In some aspects, the cell further comprises a gRNA comprising a first region that is complementary to a target nucleic acid sequence in a eukaryotic genome and a second region that binds to the programmable CasΦ nuclease. In some aspects, the first region comprises a seed region comprising between 10 and 16 nucleosides. In some aspects, the seed region comprises 16 nucleosides. In some aspects, a vector comprises a nucleic acid described herein. In some aspects, the vector is a viral vector.

[0057] In various aspects, the present disclosure provides a guide nucleic acid, or a nucleic acid encoding said guide nucleic acid, comprising a sequence that is the same as or differs by no more than 5, 4, 3, 2, or 1 nucleotides from: a sequence from Tables A to AH; or a sequence comprising a repeat sequence from Table 2 and a spacer sequence from Tables A to H. In some aspects, the guide nucleic acid comprises a sequence from Tables A to AH; or a sequence comprising a repeat sequence from Table 2 and a spacer sequence from Tables A to H. In some aspects, the guide nucleic acid comprises RNA and/or DNA. In some aspects, the guide nucleic acid is a guide RNA. Some aspects further comprise a complex comprising the guide nucleic acid and a programmable CasΦ nuclease. Some aspects comprise a eukaryotic cell comprising the guide nucleic acid. In some aspects, the eukaryotic cell further comprises a programmable CasΦ nuclease. Some aspects further comprise a vector encoding the guide nucleic acid. In some aspects, the vector is a viral vector.

[0058] In various aspects, the present disclosure provides a method of introducing a first modification in a first gene and a second modification in a second gene, the method comprising contacting a cell with a CasΦ nuclease; a first guide RNA that is at least partially complementary to an equal length portion of the first gene; and a second guide RNA that is at least partially complementary to an equal length portion of the second gene. In some aspects, the CasΦ nuclease is a CasΦ 12 nuclease. In some aspects, the CasΦ 12 nuclease comprises or consists of an amino acid sequence of SEQ ID NO: 12. In some aspects, the first and/or second modification comprises an insertion of a nucleotide, a deletion of a nucleotide or a combination thereof. In some aspects, the first and/or second modification comprises an epigenetic modification. In some aspects, the first and/or second mutation results in a reduction in the expression of the first gene and/or second gene, respectively. In some aspects, the reduction in the expression is at least about a 10% reduction, at least about a 20% reduction, at least about a 30% reduction, at least about a 40% reduction, at least about a 50% reduction, at least about a 60% reduction, at least about a 70% reduction, at least about an 80% reduction, or at least about a 90% reduction. In some aspects, the method comprises contacting the cell with three different guide RNAs targeting three different genes.

[0059] In various aspects, the present disclosure provides a programmable CasΦ nuclease or a nucleic acid encoding said programmable CasΦ nuclease, wherein said programmable CasΦ nuclease comprises at least 85% sequence identity to SEQ ID NO: 12. In some aspects, the programmable CasΦ nuclease comprises at least 90% sequence identity to SEQ ID NO: 12. In some aspects, the programmable CasΦ nuclease comprises at least 95% sequence identity to SEQ ID NO: 12. In some aspects, the programmable CasΦ nuclease comprises at least 98% sequence identity to SEQ ID NO: 12. In some aspects, the programmable CasΦ nuclease comprises or consists of an amino acid sequence of SEQ ID NO: 12. In some aspects, the programmable CasΦ nuclease comprises at least 85% sequence identity to SEQ ID NO: 18. In some aspects, the programmable CasΦ nuclease comprises at least 90% sequence identity to SEQ ID NO: 18. In some aspects, the programmable CasΦ nuclease comprises at least 95% sequence identity to SEQ ID NO: 18. In some aspects, the programmable CasΦ nuclease comprises at least 98% sequence identity to SEQ ID NO: 18. In some aspects, the programmable CasΦ nuclease comprises or consists of an amino acid sequence of SEQ ID NO: 18. In some aspects, the programmable CasΦ nuclease comprises at least 85% sequence identity to SEQ ID NO: 32. In some aspects, the programmable CasΦ nuclease comprises at least 85% sequence identity to SEQ ID NO: 32. In some aspects, the programmable CasΦ nuclease comprises at least 90% sequence identity to SEQ ID NO: 32. In some aspects, the programmable CasΦ nuclease comprises at least 95% sequence identity to SEQ ID NO: 32. In some aspects, the programmable CasΦ nuclease comprises at least 98% sequence identity to SEQ ID NO: 32. In some aspects, the programmable CasΦ nuclease comprises or consists of an amino acid sequence of SEQ ID NO: 32. In some aspects, the programmable CasΦ nuclease is capable of binding to a guide RNA comprising a first region that is complementary to a target nucleic acid sequence in a eukaryotic genome and a second region that binds to the programmable CasΦ nuclease. In some aspects, the a complex comprising the programmable CasΦ nuclease and the guide RNA binds to the target sequence. In some aspects, the programmable CasΦ nuclease does not require a tracrRNA to cleave a target nucleic acid. In some aspects, the programmable CasΦ nuclease comprises a RuvC domain, wherein the RuvC domain is capable of processing a pre-crRNA and cleaving a target nucleic acid.

[0060] In various aspects, the present disclosure provides a composition comprising the programmable CasΦ nuclease disclosed herein or a nucleic acid encoding said programmable nuclease, and a guide nucleic acid comprising a first region that is complementary to a target nucleic acid sequence in a eukaryotic genome and a second region that binds to the programmable CasΦ nuclease. In some aspects, the first region comprises a seed region comprising between 10 and 16 nucleosides. In some aspects, the seed region comprises 16 nucleosides. In some aspects, the composition comprises the programmable CasΦ nuclease or a nucleic acid encoding said programmable nuclease and a cell, preferably wherein the cell is a eukaryotic cell. In various aspects, the present disclosure provides a programmable CasΦ nuclease disclosed herein or a nucleic acid encoding said programmable nuclease, and a guide nucleic acid comprising a first region that is complementary to a target nucleic acid sequence in a eukaryotic genome and a second region that binds to the programmable CasΦ nuclease and a cell, preferably wherein the cell is a eukaryotic cell. In some aspects, the first region comprises a seed region comprising between 10 and 16 nucleosides. In some aspects, the seed region comprises 16 nucleosides.

[0061] In various aspects, the present disclosure provides a eukaryotic cell comprising the programmable CasΦ nuclease disclosed herein or a nucleic acid encoding said programmable nuclease. In some aspects, the cell further comprises a guide nucleic acid comprising a first region that is complementary to a target nucleic acid sequence in a eukaryotic genome and a second region that binds to the programmable CasΦ nuclease. In some aspects, the first region comprises a seed region comprising between 10 and 16 nucleosides. In some aspects, the seed region comprises 16 nucleosides.

[0062] In various aspects, the present disclosure provides a vector comprising the nucleic acid encoding a programmable nuclease as disclosed herein. In some aspects, the vector is a viral vector. In some aspects, the vector further comprises a nucleic acid encoding a guide nucleic acid, wherein the guide nucleic acid comprises a first region that is complementary to a target nucleic acid sequence in a eukaryotic genome and a second region that binds to the programmable CasΦ nuclease. In some aspects, the guide nucleic acid is a guide RNA. In some aspects, the vector further comprises a donor polynucleotide. In some aspects, the guide nucleic acid is a guide RNA.

[0063] In various aspects, the present disclosure provides a programmable nuclease or a nucleic acid encoding said programmable nuclease, wherein said programmable nuclease is a Type V CRISPR/Cas enzyme nuclease and comprises between 400 and 900 amino acids, and wherein the programmable nuclease is capable of binding to a guide RNA comprising a first region that is complementary to a target nucleic acid sequence in a eukaryotic genome and a second region that binds to the programmable nuclease; a complex comprising the programmable nuclease and the guide RNA binds to the target sequence; the programmable nuclease comprises a RuvC domain, wherein the RuvC domain is capable of processing a pre-crRNA and cleaving the target nucleic acid; the programmable nuclease cleaves both strands of the target nucleic acid comprising the target sequence, wherein the strand break is a staggered cut with a 5′ overhang; and the programmable nuclease does not require a tracrRNA to cleave the target nucleic acid.

[0064] In various aspects, the present disclosure provides a programmable nuclease or a nucleic acid encoding said programmable nuclease, wherein said programmable nuclease is a Type V CRISPR/Cas enzyme nuclease and comprises between 400 and 900 amino acids, and wherein the programmable nuclease is capable of binding to a guide RNA comprising a first region that is complementary to a target nucleic acid sequence in a eukaryotic genome and a second region that binds to the programmable nuclease; a complex comprising the programmable nuclease and the guide RNA binds to the target sequence; the RuvC-like domain is capable of processing a pre-crRNA and cleaving the target nucleic acid; the programmable nuclease is capable of cleaving the second region of the guide RNA in mammalian cells; and the programmable nuclease does not require a tracrRNA to cleave the target nucleic acid.

[0065] In various aspects, the present disclosure provides a programmable nuclease or a nucleic acid encoding said programmable nuclease, wherein said programmable nuclease is a Type V CRISPR/Cas enzyme nuclease and comprises between 400 and 900 amino acids, and wherein the programmable nuclease is capable of binding to a guide RNA comprising a first region that is complementary to a target nucleic acid sequence in a eukaryotic genome and a second region that binds to the programmable nuclease; a complex comprising the programmable nuclease and the guide RNA binds to the target sequence; the RuvC-like domain is capable of processing a pre-crRNA and cleaving the target nucleic acid; the programmable nuclease cleaves both strands of a target nucleic acid comprising the target sequence, wherein the strand break is a staggered cut with a 5′ overhang; the programmable nuclease is capable of cleaving the second region of the guide RNA in mammalian cells; and the programmable nuclease does not require a tracrRNA to cleave the target nucleic acid.

[0066] In various aspects, the present disclosure provides a programmable nuclease or a nucleic acid encoding said programmable nuclease, wherein said programmable nuclease is a Type V CRISPR/Cas enzyme nuclease and comprises between 400 and 900 amino acids, and wherein the programmable nuclease is capable of binding to a guide RNA comprising a first region that is complementary to a target nucleic acid sequence in a eukaryotic genome and a second region that binds to the programmable nuclease, wherein the first region comprises a seed region comprising between 10 and 16 nucleosides; a complex comprising the programmable nuclease and the guide RNA binds to the target sequence; the RuvC-like domain is capable of processing a pre-crRNA and cleaving the target nucleic acid; and the programmable nuclease does not require a tracrRNA to cleave the target nucleic acid.

[0067] In various aspects, the present disclosure provides a programmable nuclease or a nucleic acid encoding said programmable nuclease, wherein said programmable nuclease is a Type V CRISPR/Cas enzyme nuclease and comprises between 400 and 900 amino acids, and wherein the programmable nuclease is capable of binding to a guide RNA comprising a first region that is complementary to a target nucleic acid sequence in a eukaryotic genome and a second region that binds to the programmable nuclease, wherein the first region comprises a seed region comprising between 10 and 16 nucleosides; a complex comprising the programmable nuclease and the guide RNA binds to the target sequence; the RuvC-like domain is capable of processing a pre-crRNA and cleaving the target nucleic acid; the programmable nuclease cleaves both strands of the target nucleic acid comprising the target sequence, wherein the strand break is a staggered cut with a 5′ overhang; and the programmable nuclease does not require a tracrRNA to cleave the target nucleic acid.

[0068] In various aspects, the present disclosure provides a programmable nuclease or a nucleic acid encoding said programmable nuclease, wherein said programmable nuclease is a Type V CRISPR/Cas enzyme nuclease and comprises between 400 and 900 amino acids, and wherein the programmable nuclease is capable of binding to a guide RNA comprising a first region that is complementary to a target nucleic acid sequence in a eukaryotic genome and a second region that binds to the programmable nuclease, wherein the first region comprises a seed region comprising between 10 and 16 nucleosides; a complex comprising the programmable nuclease and the guide RNA binds to the target sequence; the RuvC-like domain is capable of processing a pre-crRNA and cleaving the target nucleic acid; the programmable nuclease is capable of cleaving the second region of the guide RNA in mammalian cells; and the programmable nuclease does not require a tracrRNA to cleave the target nucleic acid.

[0069] In various aspects, the present disclosure provides a programmable nuclease or a nucleic acid encoding said programmable nuclease, wherein said programmable nuclease is a Type V CRISPR/Cas enzyme nuclease and comprises between 400 and 900 amino acids, and wherein the programmable nuclease is capable of binding to a guide RNA comprising a first region that is complementary to a target nucleic acid sequence in a eukaryotic genome and a second region that binds to the programmable nuclease, wherein the first region comprises a seed region comprising between 10 and 16 nucleosides; a complex comprising the programmable nuclease and the guide RNA binds to the target sequence; the RuvC-like domain is capable of processing a pre-crRNA and cleaving the target nucleic acid; the programmable nuclease cleaves both strands of a target nucleic acid comprising the target sequence, wherein the strand break is a staggered cut with a 5′ overhang; the programmable nuclease is capable of cleaving the second region of the guide RNA in mammalian cells; and the programmable nuclease does not require a tracrRNA to cleave the target nucleic acid. In some aspects, the same active site in the RuvC domain or RuvC-like domain catalyzes the processing of the pre-crRNA and the cleaving of the target nucleic acid. In some aspects, the programmable nuclease is fused or linked to one or more NLS.

[0070] In various aspects, the programmable nuclease disclosed herein or the nucleic acid encoding said programmable nuclease is fused to one or more NLS. In some aspects, the one or more NLS are fused or linked to the N-terminus of the programmable nuclease. In some aspects, the one or more NLS are fused or linked to the C-terminus of the programmable nuclease; or the one or more NLS are fused or linked to the N-terminus and the C-terminus of the programmable nuclease.

[0071] In various aspects, the present disclosure provides a composition comprising a programmable nuclease disclosed herein or a nucleic acid encoding the programmable nuclease; and a gRNA comprising a first region that is complementary to a target nucleic acid sequence in a eukaryotic genome and a second region that binds to the programmable nuclease. In some aspects, the first region comprises a seed region comprising between 10 and 16 nucleosides. In some aspects, the seed region comprises 16 nucleosides. In some aspects, the programmable nuclease or a nucleic acid disclosed herein is comprised in a cell, preferably wherein the cell is a eukaryotic cell. In some aspects, the composition comprising the programmable nuclease or a nucleic acid disclosed herein further comprises a gRNA comprising a first region that is complementary to a target nucleic acid sequence in a eukaryotic genome and a second region that binds to the programmable nuclease and a cell, preferably wherein the cell is a eukaryotic cell. In some aspects, the first region comprises a seed region comprising between 10 and 16 nucleosides. In some aspects, the seed region comprises 16 nucleosides.

[0072] In various aspects, the present disclosure provides a eukaryotic cell comprising a programmable nuclease disclosed herein or a nucleic acid molecule encoding said programmable nuclease. In some aspects, the cell further comprises a gRNA comprising a first region that is complementary to a target nucleic acid sequence in a eukaryotic genome and a second region that binds to the programmable nuclease. In some aspects, the first region comprises a seed region comprising between 10 and 16 nucleosides. In some aspects, the seed region comprises 16 nucleosides. In some aspects, the nucleic acid disclosed herein is comprised in a vector. In some aspects, the vector is a viral vector.

[0073] In some aspects, the present disclosure provides a complex comprising a first programmable CasΦ nuclease and a second programmable CasΦ nuclease. In some aspects, the first programmable CasΦ nuclease and the second programmable CasΦ nuclease are the same programmable CasΦ nuclease. In some aspects, the dimer comprises a first programmable CasΦ nuclease and a second programmable CasΦ nuclease. In some aspects, the composition comprises a first programmable CasΦ nuclease and a second programmable CasΦ nuclease.

[0074] In various aspects, the present disclosure provides a method of modifying a cell comprising a target nucleic acid, comprising introducing a composition comprising a programmable CasΦ nuclease, programmable nuclease or a cas nuclease to a cell, wherein the programmable CasΦ nuclease, programmable nuclease or the cas nuclease cleaves the target nucleic acid, thereby modifying the cell.

[0075] In various aspects, the disclosure provides a method of modifying a cell comprising a target nucleic acid, comprising introducing to the cell (i) the programmable CasΦ nuclease or programmable nuclease disclosed herein and (ii) a guide nucleic acid, wherein the programmable CasΦ nuclease or programmable Cas nuclease cleaves the target nucleic acid, thereby modifying the cell. In some aspects, the guide nucleic acid is a guide RNA. In some aspects, the method further comprises introducing a donor polynucleotide to the cell. In some aspects, the method comprises inserting the donor polynucleotide into the target nucleic acid at the site of cleavage. In some aspects, the cell is a eukaryotic cell, preferably a human cell. In some aspects, the cell is a T cell. In some aspects, the cell is a CAR-T cell. In some aspects, the cell is a stem cell. In some aspects, the cell is a hematopoietic stem cell. In some aspects, the stem cell is a pluripotent stem cell, preferably an induced pluripotent stem cell. In some aspects, the modified cell obtained or obtainable by the method disclosed herein. In some aspect, the disclosure provides a modified human cell obtained or obtainable by the methods herein. In some aspects, the modified cell is a eukaryotic cell, preferably a human cell. In some aspects, the cell is a T cell. In some aspects, the T cell is a CAR-T cell. In some aspects, the cell is a stem cell. In some aspects, the cell is a hematopoietic stem cell. In some aspects, the cell is a pluripotent stem cell, preferably an induced pluripotent stem cell.

[0076] In some aspects, the method comprises the use of a CasΦ nuclease to introduce a first modification in a first gene and a second modification in a gene according to the methods disclosed herein. In some aspects, the method comprises the use of a programmable CasΦ nuclease, programmable nuclease or a cas nuclease to modify a cell according to the methods disclosed herein. In some aspects, the method comprises lipid nanoparticle delivery of a nucleic acid encoding the programmable CasΦ nuclease, programmable nuclease or cas nuclease, and the guide nucleic acid. In some aspects, the nucleic acid further comprises a donor polynucleotide. In some aspects, the nucleic acid is a viral vector. In some aspects, the viral vector is an AAV vector.

### INCORPORATION BY REFERENCE

[0077] All publications, patents, and patent applications mentioned in this specification are herein incorporated by reference to the same extent as if each individual publication, patent, or patent application was specifically and individually indicated to be incorporated by reference.

### BRIEF DESCRIPTION OF THE DRAWINGS

[0078] The novel features of the invention are set forth with particularity in the appended claims. A better understanding of the features and advantages of the present invention will be obtained by reference to the following detailed description that sets forth illustrative embodiments, in which the principles of the invention are utilized, and the accompanying drawings of which:

[0079] FIG. 1 illustrates results of a cis-cleavage assay on CasΦ polypeptides to assess programmable nickase activity. The results showed that CasΦ orthologs comprise programmable nickase activity. The assay was performed on five CasΦ polypeptides, designated CasΦ.2, CasΦ.11, CasΦ.17, CasΦ.18, and CasΦ.12, in FIG. 1. For the assay, each of the CasΦ polypeptides was complexed with a guide nucleic acid at room temperature for 20 minutes to form a ribonucleoprotein (RNP) complex. The RNP complexes for each of the CasΦ polypeptides were separately incubated at 37° C. for 60 minutes with plasmid DNA targeted by the guide nucleic acids. The graph shows the percentage of plasmids that developed nicks (single-stranded breaks) or linearized (double-stranded breaks) during the 60 minute incubation, as measured by gel-electrophoresis. The data showed that CasΦ.2, CasΦ.11, CasΦ.17, and CasΦ.18 acted as programmable nickases. CasΦ.17 and CasΦ.18 produced only nicked product. CasΦ.2 and CasΦ.11 generated some linearized product but primarily nicked intermediate. CasΦ.12 generated almost entirely linearized product.

[0080] FIG. 2A and FIG. 2B illustrate results of a cis-cleavage assay on CasΦ polypeptides to assess the effect of crRNA repeat sequence and RNP complexing temperature on the programmable nickase activity of CasΦ polypeptides. Each of three proteins (designated CasΦ.11, CasΦ.17 and CasΦ.18 in FIG. 2A and FIG. 2B) was tested for its ability to nick plasmid DNA when complexed with one of four crRNAs comprising the repeat sequences of CasΦ.2, CasΦ.7, CasΦ.10 and CasΦ.18 (abbreviated j2, j7, j10, and j 18, respectively, in FIG. 2A and FIG. 2B). FIG. 2C illustrates the alignment of CasΦ.2, CasΦ.7, CasΦ.10, and CasΦ.18 repeat sequences showing conserved (highlighted in black) and diverged nucleotides. For the assay, the RNP complex formation of each of the CasΦ polypeptides with the guide nucleic acid was performed at either room temperature or at 37° C. The incubation of the RNP complex with the input plasmid DNA that comprised the target sequence for the guide nucleic acids was carried out for 60 minutes at 37° C. FIG. 2A shows the percentage of input plasmid DNA that was nicked by RNP complexes assembled at room temperature. The data showed that crRNAs comprising repeat sequences from all tested CasΦ polypeptides supported nickase activity by CasΦ.11, CasΦ.17, and CasΦ.18; the only exception was the CasΦ.17/CasΦ.2-repeat pairing.

[0081] FIG. 2B shows the percentage of input plasmid DNA that was nicked by RNP complexes assembled at 37° C. The data showed that the activity of each protein is completely abolished when complexed with crRNAs comprising a repeat sequence from CasΦ.2 or CasΦ.10. FIG. 2D shows corresponding data for CasΦ.2, CasΦ.4, CasΦ.6, CasΦ.9, CasΦ.10, CasΦ.12 and CasΦ.13 for the experiment shown in FIG. 2A and FIG. 2B. FIG. 2D also shows the percentage of input plasmid DNA that was linearized by CasΦ.2, CasΦ.4, CasΦ.6, CasΦ.9, CasΦ.10, CasΦ.11, CasΦ.12, CasΦ.13, CasΦ.17 and CasΦ.18 when complexed with one of four crRNAs J2, j7, j10 and j 18, as described above.

[0082] FIG. 3A illustrates the cleavage pattern for the control that comprised no CasΦ polypeptide. In the absence of CasΦ polypeptide, the target DNA remained uncut and resulted in complete sequencing of both target and non-target strands. FIGS. 3B-3E illustrate results of a cis-cleavage assay and sequencing run demonstrating that CasΦ nickases cleave the non-target strand of a double-stranded DNA target. A cis-cleavage assay was performed with four CasΦ polypeptides, CasΦ.12, CasΦ.2, CasΦ.11, and CasΦ.18, and a control comprising no CasΦ polypeptide, on a super-coiled plasmid DNA comprising a protospacer immediately downstream of a TTTN PAM sequence. The resulting DNA from the assay was Sanger sequenced using forward and reverse primers. The forward primer comprised the sequence of the target strand (TS) of the DNA sequence, while the reverse primer comprised the sequence of the non-target strand (NTS). If a strand had been cleaved by the CasΦ polypeptide being assayed, the sequencing signal would drop off from the cleavage site. FIG. 3B illustrates the cleavage pattern for CasΦ.12 protein, which comprises double-stranded DNA cleavage activity. As shown in the figure, the sequencing signal dropped off on both the target and the non-target strands (as shown by arrows) demonstrating cleavage of both strands. FIG. 3C illustrates the cleavage pattern for CasΦ.2, which predominantly nicks DNA as illustrated in FIG. 1. The sequencing signal dropped off only on the non-target strand (bottom arrow) demonstrating nicking of the non-target strand. FIG. 3D illustrates the cleavage pattern for CasΦ.11. As illustrated in FIG. 1, CasΦ.11 only nicks DNA after 60 minutes of incubation with plasmid DNA. The sequencing signal dropped off on the non-target strand (bottom arrow), thus demonstrating that CasΦ.11 nicks the non-target strand. FIG. 3E illustrates the cleavage pattern for CasΦ.18. As illustrated in FIG. 1, CasΦ.18 only nicks DNA after 60 minutes of incubation with plasmid DNA. The sequencing signal dropped off on the non-target strand (bottom arrow), thus demonstrating that CasΦ.18 nicks the non-target strand.

[0083] FIGS. 4A-4B illustrate results of a cis-cleavage assay on CasΦ polypeptides to assess the effect of crRNA repeat and target sequence the programmable nickase and double strand DNA cleavage activity of CasΦ polypeptides. The heat map in FIG. 4A cleavage products for 60 minute in vitro plasmid cleavage reactions of 12 CasΦ orthologs paired with 10 crRNA repeat sequences. Except for 0, all Repeat and CasΦ axis labels refer Cas12Φ system numbers. Repeat 0 is a negative control including the CasΦ.18 crRNA repeat sequence and a non-targeting spacer sequence. With rare exceptions, preference for nicking or linearizing target DNA is not affected by crRNA repeat or target DNA sequence. Raw data for CasΦ.12 and CasΦ.18 targeting spacer 1 (boxes) are shown in FIG. 4B. FIG. 4B shows the raw gel data used to generate a subset of the heat map from FIG. 4A. CasΦ.12 predominantly linearizes plasmid DNA (i.e. cleaves both strands of a double strand DNA target) whereas CasΦ.18 primarily does not proceed beyond the first strand nicking.

[0084] FIGS. 5A-5C illustrate the structural conservation of CasΦ crRNA repeats. FIG. 5A shows the structure of the crRNA repeats for CasΦ.1, CasΦ.2, CasΦ.7, CasΦ.11, CasΦ.12, CasΦ.13, CasΦ.18, and CasΦ.32. These structures were calculated using an online RNA prediction tool (https://rna.urrinc.rochester.edu/RNAstructureWeb/Servers/Predict1/Predict1.html) using default parameters at 37° C. The sequences of these repeats are provided in TABLE 2. FIG. 5B shows the consensus structure of the crRNA as determined by the LocaRNA tool using the crRNA repeats from CasΦ.1, CasΦ.2, CasΦ.4, CasΦ.7, CasΦ.10, CasΦ.11, CasΦ.12, CasΦ.13, Cas12Φ.17, CasΦ.18, CasΦ.19, CasΦ.21, CasΦ.22, CasΦ.23, CasΦ.24, CasΦ.25, CasΦ.26, CasΦ.27, CasΦ.28, CasΦ.29, CasΦ.30, CasΦ.31, CasΦ.32, CasΦ.33, CasΦ.35 and CasΦ.41.

[0085] FIG. 5C shows a further refined consensus structure of the crRNA determined by the LocaRNA tool. The LocaRNA tool aligns RNA sequences while considering consensus secondary structure of the RNA sequence.

[0086] FIGS. 6A-6C illustrate the optimal PAM preferences for CasΦ.2, CasΦ.4, CasΦ.11, CasΦ.12 and CasΦ.18. An in vitro cleavage assay was performed using a linear DNA target. Starting with a TTTA PAM, each position was varied one by one to the other 3 nucleotides for a total of 12 variants in addition to parental TTTA. FIG. 6A shows a heat map which illustrates the absolute levels of double strand cleavage (or nicking for CasΦ.18). FIG. 6B shows the data from FIG. 6A after normalization to the parental TTTA PAM as 100%. FIG. 6C shows the optimal PAM preferences of these CasΦ polypeptides with a summary of the data shown in FIG. 6A and FIG. 6B.

[0087] FIG. 7 illustrates that CasΦ polypeptides rapidly nick supercoiled DNA. CasΦ polypeptides where assembled with their native repeat crRNAs targeting one of two targets (51, TATTAAATACTCGTATTGCTGTTCGATTAT (SEQ ID NO: 108), or S2, CACAGCTTGTCTGTAAGCGGATGCCATATG (SEQ ID NO: 109)) immediately downstream of a GTTG or TTTG PAM. Reactions were initiated with the addition of supercoiled target DNA and stopped after 1, 3, 6, 15, 30 and 60 mins. The cleavage was quantified by agarose gel analysis as nicked (left column) or linear (right column). Error bars are +/−SEM of duplicate time courses.

[0088] FIGS. 8A-8B illustrate that CasΦ polypeptides prefer full-length repeats and spacers from 16 to 20 nucleotides. crRNA panels varying in repeat and spacer length were tested for their ability to support CasΦ polypeptides spacer cleavage. Two different CasΦ repeats that function across CasΦ orthologs were utilized. FIG. 8A shows results of the assay for nicking (top) or linearization (bottom) as influenced by the length of the crRNA repeat. 19 nucleotides was the shortest repeat still supporting cleaving activity. FIG. 8B shows results for nicking (top) or linearization (bottom) as influenced by the length of the crRNA spacer. The optimal spacer length varied by target but is generally 16 to 20 nucleotides.

[0089] FIGS. 9A-9B illustrate CasΦ.12 cleavage in HEK293T cells and the effect of changing the spacer length on this cleavage. FIG. 9A provides a schematic of how CasΦ.12 cleavage activity was assessed in HEK293T cells. An Ac-GFP-expressing HEK293T cell line was transfected with a plasmid expressing CasΦ.12 and its crRNA targeting the Ac-GFP gene. CasΦ.12 cleavage was assessed by the reduction in Ac-GFP-expressing cells as assessed by flow cytometry. As shown in FIG. 9B, varying the spacer length varied the degree of CasΦ.12 cleavage. CasΦ.12 has a preference for a spacer length of 17 to 22 nucleotides in HEK293T cells, but longer spacers (up to 30 nucleotides was tested) also supported CasΦ.12 cleavage.

[0090] FIGS. 10A-10B illustrate that the CasΦ disclosed herein are a novel family of Cas nucleases. As shown in FIG. 10A, the InterPro database did not recognize CasΦ.2 as a protein family member. As a positive control, the InterPro database identified Acidaminococcus sp. (strain BV3L6) as a Cas12a protein family member, as shown in FIG. 10B.

[0091] FIG. 11 illustrates the raw HMM for PF07282.

[0092] FIG. 12 illustrates the raw HMM for PF18516.

[0093] FIGS. 13A-13C illustrate the cleavage activity of CasΦ.19-CasΦ.48.

[0094] FIGS. 14A-14C illustrates the PAM requirement of CasΦ polypeptides. FIG. 14A shows the PAM requirement of CasΦ.2, CasΦ.4, CasΦ.11 and CasΦ.12. FIG. 14B shows the PAM requirement of CasΦ.20, CasΦ.26, CasΦ.32, CasΦ.38 and CasΦ.45. FIG. 14C shows the cleavage products from the assessment of the PAM requirement for CasΦ.20, CasΦ.24 and CasΦ.25. FIG. 14D shows the quantification of the raw data shown in FIG. 14C.

[0095] FIG. 15 illustrates endogenous gene editing in HEK293T cells.

[0096] FIGS. 16A-16L illustrate endogenous gene editing in CHO cells. FIG. 16A shows CasΦ.12 mediated generation of insertion or deletion mutations (indel) in the endogenous Bak1, Bax and Fut8 genes. FIG. 16B shows the DNA donor oligos used to assess CasΦ.12 mediated gene editing via the homology directed repair pathway. FIG. 16C shows the detection of indels following delivery of CasΦ.12. FIG. 16D shows the sequence analysis for the data in FIG. 16C.

[0097] FIG. 16E shows the detection of incorporated donor template following delivery of CasΦ.12 and a donor oligo. Further examples of CasΦ.12 mediated generation of indel mutations are shown in FIG. 16F, FIG. 16G and FIG. 16H for Bak1, Bax and Fut8 genes, respectively. FIG. 16I shows the DNA donor oligos used to assess CasΦ.12 mediated gene editing via the homology directed repair pathway. FIG. 16J shows the frequency of HDR in CHO cells following delivery of either Cas9 and a gRNA targeting Bax, CasΦ.12 and a gRNA targeting Bax or CasΦ.12 and a gRNA targeting Fut8. FIG. 16K and FIG. 16L show the frequency of indel mutations and HDR, respectively, detected in CHO cells following delivery of CasΦ.12 and AAV6 DNA donors at the indicated number of viral genomes per cell (1×10\hat{ }5, 3×10\hat{ }5, or 1×10\hat{ }6).

[0098] FIG. 17 illustrates endogenous gene editing in K562 cells.

[0099] FIGS. 18A-18E illustrate endogenous gene editing in primary cells. FIG. 18A shows a flow cytometry analysis of T cells that have received CasΦ.12 with or without a gRNA targeting the beta-2 microglobulin gene. FIG. 18B shows the modification detected in K562 cells and T cells following delivery of CasΦ.12 and a gRNA targeting the beta-2 microglobulin gene.

[0100] FIG. 18C shows the sequence analysis of the T cell population which received CasΦ.12 and the gRNA targeting the beta-2 microglobulin gene. FIG. 18D shows a flow cytometry analysis of T cells that have received CasΦ.12 with a gRNA targeting the T Cell Receptor Alpha Constant gene. FIG. 18E shows the sequence analysis of cell populations that received CasΦ.12 with a gRNA targeting the T Cell Receptor Alpha Constant gene. FIG. 18F shows the quantification of indels detected by sequence analysis.

[0101] FIG. 19 illustrates the cleavage of the second DNA strand by CasΦ nucleases in a separable reaction step to the cleavage of the first DNA strand.

[0102] FIG. 20 illustrates the trans cleavage of ssDNA by CasΦ nucleases in a detection assay.

[0103] FIGS. 21A-21B illustrate the CasΦ.12-mediated efficiency is comparable to that of Cas9. FIG. 21A shows the frequency of indel mutations and quantification of B2M knockout cells from flow cytometry panels in FIG. 21B.

[0104] FIGS. 22A-22B illustrate the identification of optimized gRNAs for genome editing with CasΦ.12 in CHO cells. FIG. 22A shows the frequency of indel mutations induced by CasΦ.12 polypeptides complexed with a 2′fluoro modified gRNA. FIG. 22B shows further CasΦ.12 RNP complexes that can mediate genome editing in CHO cells.

[0105] FIGS. 23A-23H illustrate minimal off-target CasΦ.12-mediated genome editing in CHO and HEK293 cells. FIGS. 23A-23F are off-target analysis InDel validation from a list of potential off-target sites based on in-silico computational predictions. FIG. 23A shows CasΦ.12 targeting Fut8, FIG. 23B shows CasΦ.12 targeting BAX, FIG. 23C shows Cas9 targeting BAX, FIG. 23D shows Cas9 targeting Fut8, FIG. 23E shows Cas9 targeting Bak1 and FIG. 23F shows CasΦ.12 targeting Bak1. FIG. 23G shows off-target analysis using unbiased guide-seq procedure, using CasΦ.12 and guides targeting human Fut8 in HEK293 cells. FIG. 23H shows off-target analysis using unbiased guide-seq procedure, using Cas9 and guides targeting human Fut8 in HEK293 cells.

[0106] FIGS. 24A-24B illustrate CasΦ.12-mediated genome editing via homology directed repair (HDR). FIG. 24A shows CasΦ.12-mediated gene editing via the HDR pathway. FIG. 24B shows a schematic of the donor oligonucleotide.

[0107] FIGS. 25A-25E illustrate the ability of CasΦ.12 to target multiple genes. FIG. 25A shows the percentage of B2M and TRAC knockout after CasΦ.12-mediated genome editing with gRNAs with a repeat length of 20 nucleotides and a spacer length of 20 nucleotides. FIG. 25B shows the percentage of B2M and TRAC knockout after CasΦ.12-mediated genome editing with gRNAs with a repeat length of 20 nucleotides and a spacer length of 17 nucleotides. FIG. 25C shows corresponding flow cytometry panels for B2M and TRAC knockout with different gRNAs. FIG. 25D shows the percentage of TRAC knockout after CasΦ.12-mediated genome editing with modified gRNAs of different spacer lengths (repeat length of 20 nucleotides and a spacer length of 17 or 20 nucleotides). FIG. 25E shows a corresponding flow cytometry panel for TRAC knockout after CasΦ.12-mediated genome editing.

[0108] FIGS. 26A-26D illustrate the extended seed region of CasΦ.12. FIG. 26A and FIG. 26B show no indel mutations or CD3 knockout occurs when there is a single or double mismatch in the first 1-16 nucleotides from the 5′ end of the spacer. FIG. 26C and FIG. 26D provide schematics of the gRNAs with mismatches.

[0109] FIGS. 27A-27B illustrate the ability of CasΦ.12 to mediate genome editing in CHO cells with modified gRNAs.

[0110] FIGS. 28A-28B illustrate the ability of CasΦ.12 to mediate genome editing with gRNAs with variations in repeat and spacer length. FIG. 28A shows the frequency of CasΦ.12-mediated indel mutations using gRNA of different repeat lengths. FIG. 28B shows the frequency of CasΦ.12-mediated indel mutations using gRNA of different spacer lengths.

[0111] FIGS. 29A-29E illustrate exemplary gRNAs for targeting CD3, B2M and PD1 with CasΦ.12 in human primary T cells. FIG. 29F shows the screening of gRNAs targeting TRAC.

[0112] FIG. 29H shows the screening of gRNAs targeting B2M. FIG. 29G and FIG. 29I show flow cytometry panels of exemplary gRNAs targeting TRAC and B2M, respectively.

[0113] FIGS. 30A-30J illustrate delivery of CasΦ.12 RNPs or CasΦ.12 mRNA both lead to efficient genome editing. FIG. 30A and FIG. 30B show flow cytometry panels of CasΦ.12 RNP complexes targeting B2M and TRAC in T cells, and are quantified in FIG. 30C and FIG. 30D.

[0114] FIG. 30E and FIG. 30F show the quantification of indels detected by sequence analysis with delivery of CasΦ.12 RNPs. FIG. 30G and FIG. 30I show the frequency of indel mutations after delivery of CasΦ.12 mRNA and the quantification of B2M knockout cells shown in FIG. 30H is an exemplary FACS panel for two data points in FIG. 30G. FIG. 30J shows the distribution of the size of indel mutations induced by CasΦ.12 or Cas9.

[0115] FIG. 31 illustrates CasΦ.12 can process its own guide RNA in mammalian cells.

[0116] FIGS. 32A-32E illustrate CasΦ polypeptide-induced cleavage patterns. FIG. 32A, shows CasΦ polypeptides generated nicked and linearized plasmid DNA. FIG. 32B shows a schematic of the cut sites on the target and non-target strand. FIG. 32C shows sequence analysis of the non-target stand target strand and is represented in FIG. 32D. FIG. 32E shows a table of cut sites and overhangs of the different CasΦ polypeptides.

[0117] FIG. 33 illustrates the ability of CasΦ RNP complexes to knockout multiple genes simultaneously. T cells were nucleofected with RNP complexes of CasΦ.12 and gRNAs targeting B2M, TRAC or PDCD1 and the percentage knockout was measured using flow cytometry.

[0118] FIG. 34 illustrates the ability of CasΦ.12 RNP complexes to mediate high efficiency genome editing of PCKS9 in mouse Hepa1-6 cells. 95 CasΦ gRNAs were used along with Cas9, as a control. CasΦ.12 RNP complexes induced a maximum indel frequency of 48%, whereas Cas9 RNP complexed induced a maximum indel frequency of 22%.

[0119] FIGS. 35A-35F illustrate the ability of a CasΦ.12 all-in-one vector to mediate genome editing in Hepa1-6 mouse hepatoma cells. FIG. 35A shows a plasmid map of the AAV encoding the CasΦ polypeptide sequence and gRNA sequence. FIG. 35B illustrates repeat truncations.

[0120] FIG. 35C shows efficient transfection with AAV. FIG. 35D shows the frequency of CasΦ.12 induced indel mutations. FIG. 35E and FIG. 35F show the frequency of CasΦ.12 induced indel mutations with different gRNA containing repeat and spacer sequences of different lengths.

[0121] FIG. 36 illustrates the optimization of LNP delivery of mRNA encoding CasΦ and gRNA. A range of N/P ratios were tested and the frequency of indel mutations was determined.

[0122] FIG. 37 illustrates CasΦ-mediated genome editing of CD34⁺ hematopoietic stem cells. Cells were nucleofected with either RNP complexes containing CasΦ.12 polypeptides and a B2M-targeting guide, or a mixture of CasΦ.12 mRNA and B2M-targeting guide and the frequency of indel mutations was determined.

[0123] FIG. 38 illustrates CasΦ-mediated genome editing of induced pluripotent stem cells. Cells were nucleofected with RNP complexes (CasΦ.12 polypeptides and gRNAs targeting either the B2M locus or targeting a CIITA locus) and the frequency of indel mutations was determined.

[0124] FIG. 39 illustrates CasΦ-mediated genome editing of the CIITA locus in K562 cells. Cells were nucleofected with RNP complexes (CasΦ polypeptides and gRNAs targeting CIITA) and the frequency of indel mutations was determined by NGS.

### DETAILED DESCRIPTION

[0125] The present disclosure provides methods, compositions, systems, and kits comprising programmable CasΦ nucleases. An illustrative composition comprises a programmable CasΦ nuclease or a nucleic acid encoding the programmable CasΦ nuclease, wherein the programmable CasΦ nuclease comprises at least 85% sequence identity to a sequence selected from the group consisting of SEQ ID NOs: 1 to 47 and SEQ ID NO. 105. In some embodiments, the composition further comprises a guide nucleic acid or a nucleic acid encoding the guide nucleic acid, wherein the guide nucleic acid comprises a region comprising a nucleotide sequence that is complementary to a target nucleic acid sequence and an additional region, wherein the region and the additional region are heterologous to each other. As used herein, the term “heterologous” may be used to describe or indicate that a first sequence is different from a second sequence and do not naturally occur together. As used herein, the term “heterologous” may be used to describe that a first moiety (e.g., a first sequence) is different from a second moiety (e.g., a second sequence) and, as such, the two moieties do not naturally occur together and are engineered to be a part of one entity. For example, a guide nucleic acid sequence comprising a region and an additional region that are heterologous to each other may indicate that the guide nucleic acid sequence is engineered to include the region and the additional region. The programmable CasΦ nuclease and the guide nucleic acid may be complexed together in a ribonucleoprotein complex. Alternatively, compositions consistent with the present disclosure include nucleic acids encoding for the programmable CasΦ nuclease and the guide nucleic acid. In some embodiments, the guide nucleic acid comprises a sequence with at least about 85% sequence identity to a sequence selected from the group consisting of SEQ ID NOs: 48 to 86. In some embodiments, the programmable CasΦ nuclease is SEQ ID NO: 12 or SEQ ID NO: 105. In some embodiments, the programmable CasΦ nuclease comprises nickase activity. In some embodiments, the programmable CasΦ nuclease comprises double-strand cleavage activity. As used herein, CasΦ may be referred to as Cas12j or Cas14u.

[0126] Also disclosed herein are compositions, methods, and systems for modifying a target nucleic acid sequence. An illustrative method for modifying a target nucleic acid sequence comprises contacting a target nucleic acid sequence with a programmable CasΦ nuclease comprising at least 85% sequence identity to a sequence selected from the group consisting of SEQ ID NOs: 1 to 47 and SEQ ID NO. 105, and a guide nucleic acid, wherein the programmable CasΦ nuclease cleaves the target nucleic acid sequence, thereby modifying the target nucleic acid sequence. In some embodiments, the programmable CasΦ nuclease introduces a double-stranded break in the target nucleic acid. In some embodiments, the programmable CasΦ nuclease introduces a single-stranded break.

[0127] Also disclosed herein are compositions, methods, and systems for modifying a target nucleic acid sequence comprising use of two or more programmable CasΦ nickases. An illustrative method for introducing a break in a target nucleic acid comprises contacting the target nucleic acid with: (a) a first guide nucleic acid comprising a region that binds to a first programmable nickase comprising at least 85% sequence identity to a sequence selected from the group consisting of SEQ ID NOs: 1 to 47 and SEQ ID NO. 105; and (b) a second guide nucleic acid comprising a region that binds to a second programmable nickase comprising at least 85% sequence identity to a sequence selected from the group consisting of SEQ ID NOs: 1 to 47 and SEQ ID NO. 105, wherein the first guide nucleic acid comprises an additional region that binds to the target nucleic acid and wherein the second guide nucleic acid comprises an additional region that binds to the target nucleic acid and wherein the additional region of the first guide nucleic acid and the additional region of the second guide nucleic acid bind opposing strands of the target nucleic acid.

[0128] Also disclosed herein are compositions, methods, and systems for detecting a target nucleic acid in a sample. An illustrative method for detecting a target nucleic acid in a sample comprises contacting the sample comprising the target nucleic acid with (a) a programmable CasΦ nuclease comprising at least 85% sequence identity to a sequence selected from the group consisting of SEQ ID NOs: 1 to 47 and SEQ ID NO. 105; (b) a guide RNA comprising a region that binds to the programmable CasΦ nuclease and an additional region that binds to the target nucleic acid; and (c) a labeled, single stranded DNA reporter that does not bind the guide RNA; cleaving the labeled single stranded DNA reporter by the programmable CasΦ nuclease to release a detectable label; and detecting the target nucleic acid by measuring a signal from the detectable label.

[0129] Also disclosed herein are compositions, methods, and systems for modulating transcription of a gene in a cell. An illustrative method of modulating transcription of a gene in a cell comprises introducing into a cell comprising a target nucleic acid sequence: (i) a fusion polypeptide or a nucleic acid encoding the fusion polypeptide, wherein the fusion polypeptide comprises: (a) a dCasΦ polypeptide comprising at least 85% sequence identity to a sequence selected from the group consisting of SEQ ID NOs: 1 to 47 and SEQ ID NO. 105, wherein the dCasΦ polypeptide is enzymatically inactive; and (b) a polypeptide comprising transcriptional regulation activity; and (ii) a guide nucleic acid, or a nucleic acid comprising a nucleotide sequence encoding the guide nucleic acid, wherein the guide nucleic acid comprises a region that binds to the dCasΦ polypeptide and an additional region that binds to the target nucleic acid; wherein transcription of the gene is modulated through the fusion polypeptide acting on the target nucleic acid sequence.

[0130] Also disclosed is use of a programmable CasΦ nuclease to modify a target nucleic acid sequence according to any of the methods described herein. Also disclosed is use of a first programmable nickase and a second programmable nickase to introduce a break in a target nucleic acid according to any of the methods described herein. Also disclosed is use of a programmable CasΦ nuclease to detect a target nucleic acid in a sample according to any of the methods described herein. Also disclosed is use of a dCasΦ polypeptide to modulate transcription of a gene in a cell according to any of the methods described herein.

### Programmable Nucleases

[0131] The present disclosure provides methods and compositions comprising programmable nucleases. The programmable nucleases can be complexed with a guide nucleic acid of the disclosure for targeting a target nucleic acid for detection, editing, modification, or regulation of the target nucleic acid.

[0132] The programmable nuclease can be used for detecting a target nucleic acid. For example, in certain embodiments, when the programmable nuclease is complexed with the guide nucleic acid and the target nucleic acid hybridizes to the guide nucleic acid, trans-cleavage of a single stranded DNA (ssDNA), such as an ssDNA reporter, by the programmable nuclease is activated. Detection of trans-cleavage of ssDNA can be used to determine a target nucleic acid in a sample.

[0133] The programmable nuclease can be used for editing or modifying a target nucleic acid, for example, by site-specific cleavage of a target sequence, donor nucleic acid insertion, or a combination thereof.

[0134] The programmable nuclease can be used for gene regulation of a target nucleic acid, for example, using a catalytically inactive programmable nuclease in combination with a polypeptide comprising gene regulation activity.

[0135] In some embodiments, the programmable nuclease is a programmable nuclease comprising site-specific nucleic acid cleavage activity. In some embodiments, the programmable nuclease is a programmable nuclease comprising double-strand DNA cleavage activity. In some embodiments, the programmable nuclease is a programmable nickase. In some embodiments, the programmable nuclease is a programmable DNA nickase. In some embodiments, the programmable nuclease is a programmable nuclease comprising a catalytically inactive nuclease domain. In some embodiments, the programmable nuclease comprising a catalytically inactive nuclease domain can include at least 1, at least 2, at least 3, at least 4, or at least 5 mutations relative to a wild type nuclease domain. Said mutations may be present within the cleaving or active site of the nuclease.

[0136] In some embodiments, the programmable nuclease is a programmable DNA nuclease. In some embodiments, the programmable nuclease is a Type V CRISPR/Cas enzyme, wherein a Type V CRISPR/Cas enzyme comprises a single active site or catalytic domain in a single RuvC domain. The RuvC domain is typically near the C-terminus of the enzyme. A single RuvC domain may comprise RuvC subdomains, for example RuvCI, RuvCII and RuvCIII. As used herein a “Type V CRISPR/Cas enzyme” or “Type V cas nuclease” or “Type V cas effector” may be used to describe a family of enzymes or a member thereof having diverse N-terminal structures and often comprising a conserved single catalytic RuvC-like endonuclease domain that is C-terminal of the N-terminal structures, derived from the TnpB protein encoded by autonomous or non-autonomous transposons. The terms “RuvC domain” and “RuvC-like domain” are used interchangeably for Type V CRISPR/Cas enzymes, Type V cas nucleases and Type V cas effectors. In some embodiments, the Type V CRISPR/Cas enzyme is a CasΦ nuclease. A CasΦ polypeptide can function as an endonuclease that catalyzes cleavage at a specific sequence in a target nucleic acid. A programmable CasΦ nuclease of the present disclosure may have a single active site in a RuvC domain that is capable of catalyzing pre-crRNA processing and nicking or cleaving of nucleic acids. This compact catalytic site may render the programmable CasΦ nuclease especially advantageous for genome engineering and new functionalities for genome manipulation.

[0137] In some embodiments, the RuvC domain is a RuvC-like domain. Various RuvC-like domains are known in the art and are easily identified using online tools such as InterPro (https://www.ebi.ac.uk/interpro/). For example, a RuvC-like domain may be a domain which shares homology with a region of TnpB proteins of the IS605 and other related families of transposons, as described in review articles such as Shmakov et al. (Nature Reviews Microbiology volume 15, pages 169-182(2017)) and Koonin E. V. and Makarova K. S. (2019, Phil. Trans. R. Soc., B 374:20180087). In some embodiments, the RuvC-like domain shares homology with the transposase IS605, OrfB, C-terminal. A transposase IS605, OrfB, C-terminal is easily identified by the skilled person using bioinformatics tools, such as PFAM (Finn et al. (Nucleic Acids Res. 2014 Jan. 1; 42(Database issue): D222-D230); El-Gebali et al. (2019) Nucleic Acids Res. doi:10.1093/nar/gky995). PFAM is a database of protein families in which each entry is composed of a seed alignment which forms the basis to build a profile hidden Markov model (HMM) using the HMMER software (hmmer.org). It is readily accessible via pfam.xfam.org, maintained by EMBL-EBI, which easily allows an amino acid sequence to be analyzed against the current release of PFAM (e.g. version 33.1 from May 2020), but local builds can also be implemented using publicly- and freely-available database files and tools. A transposase IS605, OrfB, C-terminal is easily identified by the skilled person using the HMM PF07282. PF07282 is reproduced for reference in FIG. 11 (accession number PF07282.12). The skilled person would also be able to identify a RuvC domain, for example with the HMM PF18516, using the PFAM tool. PF18516 is reproduced for reference in FIG. 12 (accession number PF18516.2). In some embodiments, the programmable CasΦ nuclease comprises a RuvC-like domain which matches PFAM family PF07282 but does not match PFAM family PF18516, as assessed using the PFAM tool (e.g. using PFAM version 33.1, and the HMM accession numbers PF07282.12 and PF18516.2). PFAM searches should ideally be performed using an E-value cut-off set at 1.0.

[0138] In some embodiments, a programmable nuclease described herein—or a programmable nuclease and guide RNA combination described herein—has an editing efficiency of at least 1%, at least 2%, at least 3%, at least 4%, at least 5%, at least 6%, at least 7%, at least 8%, at least 9%, at least 10%, at least 11%, at least 12%, at least 13%, at least 14%, at least 15%, at least 16%, at least 17%, at least 18%, at least 19%, at least 20%, at least 21%, at least 22%, at least 23%, at least 24%, at least 25%, at least 26%, at least 27%, at least 28%, at least 29%, at least 30%, at least 31%, at least 32%, at least 33%, at least 34%, at least 35%, at least 36%, at least 37%, at least 38%, at least 39%, at least 40%, at least 41%, at least 42%, at least 43%, at least 44%, at least 45%, at least 46%, at least 47%, at least 48%, at least 49%, at least 50%, at least 51%, at least 52%, at least 53%, at least 54%, at least 55%, at least 56%, at least 57%, at least 58%, at least 59%, at least 60%, at least 61%, at least 62%, at least 63%, at least 64%, at least 65%, at least 66%, at least 67%, at least 68%, at least 69%, at least 70%, at least 71%, at least 72%, at least 73%, at least 74%, at least 75%, at least 76%, at least 77%, at least 78%, at least 79%, at least 80%, at least 81%, at least 82%, at least 83%, at least 84%, at least 85%, at least 86%, at least 87%, at least 88%, at least 89%, at least 90%, at least 91%, at least 92%, at least 93%, at least 94%, at least 95%, at least 96%, at least 97%, at least 98%, at least 99%, or 100%. In some embodiments, a programmable nuclease described herein—or a programmable nuclease and guide RNA combination described herein—has an editing efficiency of at least 20%. In some embodiments, a programmable nuclease described herein—or a programmable nuclease and guide RNA combination described herein—has an editing efficiency of at least 25%. In some embodiments, a programmable nuclease described herein—or a programmable nuclease and guide RNA combination described herein—has an editing efficiency of at least 30%. In some embodiments, a programmable nuclease described herein—or a programmable nuclease and guide RNA combination described herein—has an editing efficiency of at least 35%. In some embodiments, a programmable nuclease described herein—or a programmable nuclease and guide RNA combination described herein—has an editing efficiency of at least 40%. In some embodiments, a programmable nuclease described herein—or a programmable nuclease and guide RNA combination described herein—has an editing efficiency of at least 45%. In some embodiments, a programmable nuclease described herein—or a programmable nuclease and guide RNA combination described herein—has an editing efficiency of at least 50%. In some embodiments, a programmable nuclease described herein—or a programmable nuclease and guide RNA combination described herein—has an editing efficiency of at least 55%. In some embodiments, a programmable nuclease described herein—or a programmable nuclease and guide RNA combination described herein—has an editing efficiency of at least 60%. In some embodiments, a programmable nuclease described herein—or a programmable nuclease and guide RNA combination described herein—has an editing efficiency of at least 65%. In some embodiments, a programmable nuclease described herein—or a programmable nuclease and guide RNA combination described herein—has an editing efficiency of at least 70%. In some embodiments, a programmable nuclease described herein—or a programmable nuclease and guide RNA combination described herein—has an editing efficiency of at least 75%. In some embodiments, a programmable nuclease described herein—or a programmable nuclease and guide RNA combination described herein—has an editing efficiency of at least 80%. In some embodiments, a programmable nuclease described herein—or a programmable nuclease and guide RNA combination described herein—has an editing efficiency of at least 85%. In some, a programmable nuclease described herein—or a programmable nuclease and guide RNA combination described herein—has an editing efficiency of at least 90%. In some embodiments, a programmable nuclease described herein—or a programmable nuclease and guide RNA combination described herein—has an editing efficiency of at least 95%. In some embodiments, a programmable nuclease described herein—or a programmable nuclease and guide RNA combination described herein—has an editing efficiency of at least 100%. In some embodiments, a programmable nuclease described herein—or a programmable nuclease and guide RNA combination described herein—has an editing efficiency of 42%. In some embodiments, said editing efficiency is determined by analyzing the frequency of indel mutations in a nucleic acid or gene knockout.

[0139] In some embodiments, a programmable nuclease described herein has a primary amino acid sequence length of less than 1500 amino acids, less than 1450 amino acids, less than 1400 amino acids, less than 1350 amino acids, less than 1300 amino acids, less than 1250 amino acids, less than 1200 amino acids, less than 1150 amino acids, less than 1100 amino acids, less than 1050 amino acids, less than 1000 amino acids, less than 950 amino acids, less than 900 amino acids, less than 850 amino acids, or less than 800 amino acids.

[0140] In some examples, a programmable nuclease described herein is a Type V cas nuclease. In some examples, the Type V cas nuclease, or a composition comprising the Type V cas nuclease, has an editing efficiency of at least 20%. In some examples, the Type V cas nuclease, or a composition comprising the Type V cas nuclease, has an editing efficiency of at least 25%. In some examples, the Type V cas nuclease, or a composition comprising the Type V cas nuclease, has an editing efficiency of at least 30%. In some examples, the Type V cas nuclease, or a composition comprising the Type V cas nuclease, has an editing efficiency of at least 35%. In some examples, the Type V cas nuclease, or a composition comprising the Type V cas nuclease, has an editing efficiency of at least 40%. In some examples, the Type V cas nuclease, or a composition comprising the Type V cas nuclease, has an editing efficiency of at least 45%. In some examples, the Type V cas nuclease, or a composition comprising the Type V cas nuclease, has an editing efficiency of at least 50%. In some examples, the Type V cas nuclease, or a composition comprising the Type V cas nuclease, has an editing efficiency of at least 55%.

[0141] In some examples, the Type V cas nuclease, or a composition comprising the Type V cas nuclease, has an editing efficiency of at least 60%. In some examples, the Type V cas nuclease, or a composition comprising the Type V cas nuclease, has an editing efficiency of at least 65%. In some examples, the Type V cas nuclease, or a composition comprising the Type V cas nuclease, has an editing efficiency of at least 70%. In some examples, the Type V cas nuclease, or a composition comprising the Type V cas nuclease, has an editing efficiency of at least 75%. In some examples, the Type V cas nuclease, or a composition comprising the Type V cas nuclease, has an editing efficiency of at least 80%. In some examples, the Type V cas nuclease, or a composition comprising the Type V cas nuclease, has an editing efficiency of at least 85%. In some examples, the Type V cas nuclease, or a composition comprising the Type V cas nuclease, has an editing efficiency of at least 90%. In some examples, the Type V cas nuclease, or a composition comprising the Type V cas nuclease, has an editing efficiency of at least 95%. In some examples, the Type V cas nuclease, or a composition comprising the Type V cas nuclease, has an editing efficiency of 100%.

[0142] In some examples, a programmable nuclease described herein has a primary amino acid sequence length of less than 850 amino acids. In some examples, the programmable nuclease having a primary amino acid sequence length of less than 850 amino acids has an editing efficiency of at least 20%. In some examples, the programmable nuclease having a primary amino acid sequence length of less than 850 amino acids has an editing efficiency of at least 25%. In some examples, the programmable nuclease having a primary amino acid sequence length of less than 850 amino acids has an editing efficiency of at least 30%. In some examples, the programmable nuclease having a primary amino acid sequence length of less than 850 amino acids has an editing efficiency of at least 35%. In some examples, the programmable nuclease having a primary amino acid sequence length of less than 850 amino acids has an editing efficiency of at least 40%. In some examples, the programmable nuclease having a primary amino acid sequence length of less than 850 amino acids has an editing efficiency of at least 45%. In some examples, the programmable nuclease having a primary amino acid sequence length of less than 850 amino acids has an editing efficiency of at least 50%. In some examples, the programmable nuclease having a primary amino acid sequence length of less than 850 amino acids has an editing efficiency of at least 55%. In some examples, the programmable nuclease having a primary amino acid sequence length of less than 850 amino acids has an editing efficiency of at least 60%. In some examples, the programmable nuclease having a primary amino acid sequence length of less than 850 amino acids has an editing efficiency of at least 65%. In some examples, the programmable nuclease having a primary amino acid sequence length of less than 850 amino acids has an editing efficiency of at least 70%. In some examples, the programmable nuclease having a primary amino acid sequence length of less than 850 amino acids has an editing efficiency of at least 75%. In some examples, the programmable nuclease having a primary amino acid sequence length of less than 850 amino acids has an editing efficiency of at least 80%. In some examples, the programmable nuclease having a primary amino acid sequence length of less than 850 amino acids has an editing efficiency of at least 85%. In some examples, the programmable nuclease having a primary amino acid sequence length of less than 850 amino acids has an editing efficiency of at least 90%. In some examples, the programmable nuclease having a primary amino acid sequence length of less than 850 amino acids has an editing efficiency of at least 95%. In some examples, the programmable nuclease having a primary amino acid sequence length of less than 850 amino acids has an editing efficiency of 100%.

[0143] TABLE 1 provides amino acid sequences of illustrative CasΦ polypeptides that can be used in compositions and methods of the disclosure.

TABLE 1
CasΦ Amino Acid Sequences

| | SEQ ID | |
|---|---|---|
| Name | NO | Amino Acid Sequence |
| CasΦ.1 | 1 | MADTPTLFTQFLRHHLPGQRFRKDILKQAGRILANKGEDATI |
| | | AFLRGKSEESPPDFQPPVKCPIIACSRPLTEWPIYQASVAIQGY |
| | | VYGQSLAEFEASDPGCSKDGLLGWFDKTGVCTDYFSVQGLN |
| | | LIFQNARKRYIGVQTKVTNRNEKRHKKLKRINAKRIAEGLPE |
| | | LTSDEPESALDETGHLIDPPGLNTNIYCYQQVSPKPLALSEVN |
| | | QLPTAYAGYSTSGDDPIQPMVTKDRLSISKGQPGYIPEHQRA |
| | | LLSQKKHRRMRGYGLKARALLVIVRIQDDWAVIDLRSLLRN |
| | | AYWRRIVQTKEPSTITKLLKLVTGDPVLDATRMVATFTYKPG |
| | | IVQVRSAKCLKNKQGSKLFSERYLNETVSVTSIDLGSNNLVA |
| | | VATYRLVNGNTPELLQRFTLPSHLVKDFERYKQAHDTLEDSI |
| | | QKTAVASLPQGQQTEIRMWSMYGFREAQERVCQELGLADG |
| | | SIPWNVMTATSTILTDLFLARGGDPKKCMFTSEPKKKKNSKQ |
| | | VLYKIRDRAWAKMYRTLLSKETREAWNKALWGLKRGSPDY |
| | | ARLSKRKEELARRCVNYTISTAEKRAQCGRTIVALEDLNIGFF |
| | | HGRGKQEPGWVGLFTRKKENRWLMQALHKAFLELAHHRG |
| | | YHVIEVNPAYTSQTCPVCRHCDPDNRDQHNREAFHCIGCGFR |
| | | GNADLDVATHNIAMVAITGESLKRARGSVASKTPQPLAAE |
| CasΦ.2 | 2 | MPKPAVESEFSKVLKKHFPGERFRSSYMKRGGKILAAQGEE |
| | | AVVAYLQGKSEEEPPNFQPPAKCHVVTKSRDFAEWPIMKAS |
| | | EAIQRYIYALSTTERAACKPGKSSESHAAWFAATGVSNHGYS |
| | | HVQGLNLIFDHTLGRYDGVLKKVQLRNEKARARLESINASR |
| | | ADEGLPEIKAEEEEVATNETGHLLQPPGINPSFYVYQTISPQA |
| | | YRPRDEIVLPPEYAGYVRDPNAPIPLGVVRNRCDIQKGCPGYI |
| | | PEWQREAGTAISPKTGKAVTVPGLSPKKNKRMRRYWRSEKE |
| | | KAQDALLVTVRIGTDWVVIDVRGLLRNARWRTIAPKDISLN |
| | | ALLDLFTGDPVIDVRRNIVTFTYTLDACGTYARKWTLKGKQ |
| | | TKATLDKLTATQTVALVAIDLGQTNPISAGISRVTQENGALQ |
| | | CEPLDRFTLPDDLLKDISAYRIAWDRNEEELRARSVEALPEA |
| | | QQAEVRALDGVSKETARTQLCADFGLDPKRLPWDKMSSNT |
| | | TFISEALLSNSVSRDQVFFTPAPKKGAKKKAPVEVMRKDRT |
| | | WARAYKPRLSVEAQKLKNEALWALKRTSPEYLKLSRRKEEL |
| | | CRRSINYVIEKTRRRTQCQIVIPVIEDLNVRFFHGSGKRLPGW |
| | | DNFFTAKKENRWFIQGLHKAFSDLRTHRSFYVFEVRPERTSIT |
| | | CPKCGHCEVGNRDGEAFQCLSCGKTCNADLDVATHNLTQV |
| | | ALTGKTMPKREEPRDAQGTAPARKTKKASKSKAPPAEREDQ |
| | | TPAQEPSQTS |
| CasΦ.3 | 3 | MYILEMADLKSEPSLLAKLLRDRFPGKYWLPKYWKLAEKKR |
| | | LTGGEEAACEYMADKQLDSPPPNFRPPARCVILAKSRPFEDW |
| | | PVHRVASKAQSFVIGLSEQGFAALRAAPPSTADARRDWLRS |
| | | HGASEDDLMALEAQLLETIMGNAISLHGGVLKKIDNANVKA |
| | | AKRLSGRNEARLNKGLQELPPEQEGSAYGADGLLVNPPGLN |
| | | LNIYCRKSCCPKPVKNTARFVGHYPGYLRDSDSILISGTMDR |
| | | LTIIEGMPGHIPAWQREQGLVKPGGRRRRLSGSESNMRQKVD |
| | | PSTGPRRSTRSGTVNRSNQRTGRNGDPLLVEIRMKEDWVLL |
| | | DARGLLRNLRWRESKRGLSCDHEDLSLSGLLALFSGDPVIDP |
| | | VRNEVVFLYGEGIIPVRSTKPVGTRQSKKLLERQASMGPLTLI |
| | | SCDLGQTNLIAGRASAISLTHGSLGVRSSVRIELDPEIIKSFERL |
| | | RKDADRLETEILTAAKETLSDEQRGEVNSHEKDSPQTAKASL |
| | | CRELGLHPPSLPWGQMGPSTTFIADMLISHGRDDDAFLSHGE |
| | | FPTLEKRKKFDKRFCLESRPLLSSETRKALNESLWEVKRTSSE |
| | | YARLSQRKKEMARRAVNFVVEISRRKTGLSNVIVNIEDLNVR |
| | | IFHGGGKQAPGWDGFFRPKSENRWFIQAIHKAFSDLAAHHGI |
| | | PVIESDPQRTSMTCPECGHCDSKNRNGVRFLCKGCGASMDA |
| | | DFDAACRNLERVALTGKPMPKPSTSCERLLSATTGKVCSDHS |
| | | LSHDAIEKAS |
| CasΦ.4 | 4 | MEKEITELTKIRREFPNKKFSSTDMKKAGKLLKAEGPDAVRD |
| | | FLNSCQEIIGDFKPPVKTNIVSISRPFEEWPVSMVGRAIQEYYF |
| | | SLTKEELESVHPGTSSEDHKSFFNITGLSNYNYTSVQGLNLIF |
| | | KNAKAIYDGTLVKANNKNKKLEKKFNEINHKRSLEGLPIITP |
| | | DFEEPFDENGHLNNPPGINRNIYGYQGCAAKVFVPSKHKMV |
| | | SLPKEYEGYNRDPNLSLAGFRNRLEIPEGEPGHVPWFQRMDI |
| | | PEGQIGHVNKIQRFNFVHGKNSGKVKFSDKTGRVKRYHHSK |
| | | YKDATKPYKFLEESKKVSALDSILAIITIGDDWVVFDIRGLYR |
| | | NVFYRELAQKGLTAVQLLDLFTGDPVIDPKKGVVTFSYKEG |
| | | VVPVFSQKIVPRFKSRDTLEKLTSQGPVALLSVDLGQNEPVA |
| | | ARVCSLKNINDKITLDNSCRISFLDDYKKQIKDYRDSLDELEI |
| | | KIRLEAINSLETNQQVEIRDLDVFSADRAKANTVDMFDIDPN |
| | | LISWDSMSDARVSTQISDLYLKNGGDESRVYFEINNKRIKRS |
| | | DYNISQLVRPKLSDSTRKNLNDSIWKLKRTSEEYLKLSKRKL |
| | | ELSRAVVNYTIRQSKLLSGINDIVIILEDLDVKKKFNGRGIRDI |
| | | GWDNFFSSRKENRWFIPAFHKAFSELSSNRGLCVIEVNPAWT |
| | | SATCPDCGFCSKENRDGINFTCRKCGVSYHADIDVATLNIAR |
| | | VAVLGKPMSGPADRERLGDTKKPRVARSRKTMKRKDISNST |
| | | VEAMVTA |
| CasΦ.5 | 5 | MDMLDTETNYATETPAQQQDYSPKPPKKAQRAPKGFSKKA |
| | | RPEKKPPKPITLFTQKHFSGVRFLKRVIRDASKILKLSESRTITF |
| | | LEQAIERDGSAPPDVTPPVHNTIMAVTRPFEEWPEVILSKALQ |
| | | KHCYALTKKIKIKTWPKKGPGKKCLAAWSARTKIPLIPGQVQ |
| | | ATNGLFDRIGSIYDGVEKKVTNRNANKKLEYDEAIKEGRNPA |
| | | VPEYETAYNIDGTLINKPGYNPNLYITQSRTPRLITEADRPLVE |
| | | KILWQMVEKKTQSRNQARRARLEKAAHLQGLPVPKFVPEK |
| | | VDRSQKIEIRIIDPLDKIEPYMPQDRMAIKASQDGHVPYWQRP |
| | | FLSKRRNRRVRAGWGKQVSSIQAWLTGALLVIVRLGNEAFL |
| | | ADIRGALRNAQWRKLLKPDATYQSLFNLFTGDPVVNTRTNH |
| | | LTMAYREGVVNIVKSRSFKGRQTREHLLTLLGQGKTVAGVS |
| | | FDLGQKHAAGLLAAHFGLGEDGNPVFTPIQACFLPQRYLDSL |
| | | TNYRNRYDALTLDMRRQSLLALTPAQQQEFADAQRDPGGQ |
| | | AKRACCLKLNLNPDEIRWDLVSGISTMISDLYIERGGDPRDV |
| | | HQQVETKPKGKRKSEIRILKIRDGKWAYDFRPKIADETRKAQ |
| | | REQLWKLQKASSEFERLSRYKINIARAIANWALQWGRELSG |
| | | CDIVIPVLEDLNVGSKFFDGKGKWLLGWDNRFTPKKENRWF |
| | | IKVLHKAVAELAPHRGVPVYEVMPHRTSMTCPACHYCHPTN |
| | | REGDRFECQSCHVVKNTDRDVAPYNILRVAVEGKTLDRWQ |
| | | AEKKPQAEPDRPMILIDNQES |
| CasΦ.6 | 6 | MDMLDTETNYATETPAQQQDYSPKPPKKAQRAPKGFSKKA |
| | | RPEKKPPKPITLFTQKHFSGVRFLKRVIRDASKILKLSESRTITF |
| | | LEQAIERDGSAPPDVTPPVHNTIMAVTRPFEEWPEVILSKALQ |
| | | KHCYALTKKIKIKTWPKKGPGKKCLAAWSARTKIPLIPGQVQ |
| | | ATNGLFDRIGSIYDGVEKKVTNRNANKKLEYDEAIKEGRNPA |
| | | VPEYETAYNIDGTLINKPGYNPNLYITQSRTPRLITEADRPLVE |
| | | KILWQMVEKKTQSRNQARRARLEKAAHLQGLPVPKFVPEK |
| | | VDRSQKIEIRIIDPLDKIEPYMPQDRMAIKASQDGHVPYWQRP |
| | | FLSKRRNRRVRAGWGKQVSSIQAWLTGALLVIVRLGNEAFL |
| | | ADIRGALRNAQWRKLLKPDATYQSLFNLFTGDPVVNTRTNH |
| | | LTMAYREGVVDIVKSRSFKGRQTREHLLTLLGQGKTVAGVS |
| | | FDLGQKHAAGLLAAHFGLGEDGNPVFTPIQACFLPQRYLDSL |
| | | TNYRNRYDALTLDMRRQSLLALTPAQQQEFADAQRDPGGQ |
| | | AKRACCLKLNLNPDEIRWDLVSGISTMISDLYIERGGDPRDV |
| | | HQQVETKPKGKRKSEIRILKIRDGKWAYDFRPKIADETRKAQ |
| | | REQLWKLQKASSEFERLSRYKINIARAIANWALQWGRELSG |
| | | CDIVIPVLEDLNVGSKFFDGKGKWLLGWDNRFTPKKENRWF |
| | | IKVLHKAVAELAPHKGVPVYEVMPHRTSMTCPACHYCHPTN |
| | | REGDRFECQSCHVVKNTDRDVAPYNILRVAVEGKTLDRWQ |
| | | AEKKPQAEPDRPMILIDNQES |
| CasΦ.7 | 7 | MSSLPTPLELLKQKHADLFKGLQFSSKDNKMAGKVLKKDGE |
| | | EAALAFLSERGVSRGELPNFRPPAKTLVVAQSRPFEEFPIYRV |
| | | SEAIQLYVYSLSVKELETVPSGSSTKKEHQRFFQDSSVPDFGY |
| | | TSVQGLNKIFGLARGIYLGVITRGENQLQKAKSKHEALNKKR |
| | | RASGEAETEFDPTPYEYMTPERKLAKPPGVNHSIMCYVDISV |
| | | DEFDFRNPDGIVLPSEYAGYCREINTAIEKGTVDRLGHLKGG |
| | | PGYIPGHQRKESTTEGPKINFRKGRIRRSYTALYAKRDSRRVR |
| | | QGKLALPSYRHHMMRLNSNAESAILAVIFFGKDWVVFDLRG |
| | | LLRNVRWRNLFVDGSTPSTLLGMFGDPVIDPKRGVVAFCYK |
| | | EQIVPVVSKSITKMVKAPELLNKLYLKSEDPLVLVAIDLGQT |
| | | NPVGVGVYRVMNASLDYEVVTRFALESELLREIESYRQRTN |
| | | AFEAQIRAETFDAMTSEEQEEITRVRAFSASKAKENVCHRFG |
| | | MPVDAVDWATMGSNTIHIAKWVMRHGDPSLVEVLEYRKDN |
| | | EIKLDKNGVPKKVKLTDKRIANLTSIRLRFSQETSKHYNDTM |
| | | WELRRKHPVYQKLSKSKADFSRRVVNSIIRRVNHLVPRARIV |
| | | FIIEDLKNLGKVFHGSGKRELGWDSYFEPKSENRWFIQVLHK |
| | | AFSETGKHKGYYIIECWPNWTSCTCPKCSCCDSENRHGEVFR |
| | | CLACGYTCNTDFGTAPDNLVKIATTGKGLPGPKKRCKGSSK |
| | | GKNPKIARSSETGVSVTESGAPKVKKSSPTQTSQSSSQSAP |
| CasΦ.8 | 8 | MNKIEKEKTPLAKLMNENFAGLRFPFAIIKQAGKKLLKEGEL |
| | | KTIEYMTGKGSIEPLPNFKPPVKCLIVAKRRDLKYFPICKASC |
| | | EIQSYVYSLNYKDFMDYFSTPMTSQKQHEEFFKKSGLNIEYQ |
| | | NVAGLNLIFNNVKNTYNGVILKVKNRNEKLKKKAIKNNYEF |
| | | EEIKTFNDDGCLINKPGINNVIYCFQSISPKILKNITHLPKEYND |
| | | YDCSVDRNIIQKYVSRLDIPESQPGHVPEWQRKLPEFNNTNN |
| | | PRRRRKWYSNGRNISKGYSVDQVNQAKIEDSLLAQIKIGED |
| | | WIILDIRGLLRDLNRRELISYKNKLTIKDVLGFFSDYPIIDIKKN |
| | | LVTFCYKEGVIQVVSQKSIGNKKSKQLLEKLIENKPIALVSID |
| | | LGQTNPVSVKISKLNKINNKISIESFTYRFLNEEILKEIEKYRK |
| | | DYDKLELKLINEA |
| CasΦ.9 | 9 | MDMLDTETNYATETPSQQQDYSPKPPKKDRRAPKGFSKKAR |
| | | PEKKPPKPITLFTQKHFSGVRFLKRVIRDASKILKLSESRTITFL |
| | | EQAIERDGSAPPDVTPPVHNTIMAVTRPFEEWPEVILSKALQK |
| | | HCYALTKKIKIKTWPKKGPGKKCLAAWSARTKIPLIPGQVQA |
| | | TNGLFDRIGSIYDGVEKKVTNRNANKKLEYDEAIKEGRNPAV |
| | | PEYETAYNIDGTLINKPGYNPNLYITQSRTPRLITEADRPLVEK |
| | | ILWQMVEKKTQSRNQARRARLEKAAHLQGLPVPKFVPEKV |
| | | DRSQKIEIRIIDPLDKIEPYMPQDRMAIKASQDGHVPYWQRPF |
| | | LSKRRNRRVRAGWGKQVSSIQAWLTGALLVIVRLGNEAFLA |
| | | DIRGALRNAQWRKLLKPDATYQSLFNLFTGDPVVNTRTNHL |
| | | TMAYREGVVDIVKSRSFKGRQTREHLLTLLGQGKTVAGVSF |
| | | DLGQKHAAGLLAAHFGLGEDGNPVFTPIQACFLPQRYLDSLT |
| | | NYRNRYDALTLDMRRQSLLALTPAQQQEFADAQRDPGGQA |
| | | KRACCLKLNLNPDEIRWDLVSGISTMISDLYIERGGDPRDVH |
| | | QQVETKPKGKRKSEIRILKIRDGKWAYDFRPKIADETRKAQR |
| | | EQLWKLQKASSEFERLSRYKINIARAIANWALQWGRELSGC |
| | | DIVIPVLEDLNVGSKFFDGKGKWLLGWDNRFTPKKENRWFI |
| | | KVLHKAVAELAPHRGVPVYEVMPHRTSMTCPACHYCHPTN |
| | | REGDRFECQSCHVVKNTDRDVAPYNILRVAVEGKTLDRWQ |
| | | AEKKPQAEPDRPMILIDNQES |
| CasΦ.10 | 10 | MDMLDTETNYATETPSQQQDYSPKPPKKDRRAPKGFSKKAR |
| | | PEKKPPKPITLFTQKHFSGVRFLKRVIRDASKILKLSESRTITFL |
| | | EQAIERDGSAPPDVTPPVHNTIMAVTRPFEEWPEVILSKALQK |
| | | HCYALTKKIKIKTWPKKGPGKKCLAAWSARTKIPLIPGQVQA |
| | | TNGLFDRIGSIYDGVEKKVTNRNANKKLEYDEAIKEGRNPAV |
| | | PEYETAYNIDGTLINKPGYNPNLYITQSRTPRLITEADRPLVEK |
| | | ILWQMVEKKTQSRNQARRARLEKAAHLQGLPVPKFVPEKV |
| | | DRSQKIEIRIIDPLDKIEPYMPQDRMAIKASQDGHVPYWQRPF |
| | | LSKRRNRRVRAGWGKQVSSIQAWLTGALLVIVRLGNEAFLA |
| | | DIRGALRNAQWRKLLKPDATYQSLFNLFTGDPVVNTRTNHL |
| | | TMAYREGVVNIVKSRSFKGRQTREHLLTLLGQGKTVAGVSF |
| | | DLGQKHAAGLLAAHFGLGEDGNPVFTPIQACFLPQRYLDSLT |
| | | NYRNRYDALTLDMRRQSLLALTPAQQQEFADAQRDPGGQA |
| | | KRACCLKLNLNPDEIRWDLVSGISTMISDLYIERGGDPRDVH |
| | | QQVETKPKGKRKSEIRILKIRDGKWAYDFRPKIADETRKAQR |
| | | EQLWKLQKASSEFERLSRYKINIARAIANWALQWGRELSGC |
| | | DIVIPVLEDLNVGSKFFDGKGKWLLGWDNRFTPKKENRWFI |
| | | KVLHKAVAELAPHRGVPVYEVMPHRTSMTCPACHYCHPTN |
| | | REGDRFECQSCHVVKNTDRDVAPYNILRVAVEGKTLDRWQ |
| | | AEKKPQAEPDRPMILIDNQES |
| CasΦ.11 | 11 | MSNKTTPPSPLSLLLRAHFPGLKFESQDYKIAGKKLRDGGPE |
| | | AVISYLTGKGQAKLKDVKPPAKAFVIAQSRPFIEWDLVRVSR |
| | | QIQEKIFGIPATKGRPKQDGLSETAFNEAVASLEVDGKSKLNE |
| | | ETRAAFYEVLGLDAPSLHAQAQNALIKSAISIREGVLKKVEN |
| | | RNEKNLSKTKRRKEAGEEATFVEEKAHDERGYLIHPPGVNQ |
| | | TIPGYQAVVIKSCPSDFIGLPSGCLAKESAEALTDYLPHDRMT |
| | | IPKGQPGYVPEWQHPLLNRRKNRRRRDWYSASLNKPKATCS |
| | | KRSGTPNRKNSRTDQIQSGRFKGAIPVLMRFQDEWVIIDIRGL |
| | | LRNARYRKLLKEKSTIPDLLSLFTGDPSIDMRQGVCTFIYKAG |
| | | QACSAKMVKTKNAPEILSELTKSGPVVLVSIDLGQTNPIAAK |
| | | VSRVTQLSDGQLSHETLLRELLSNDSSDGKEIARYRVASDRL |
| | | RDKLANLAVERLSPEHKSEILRAKNDTPALCKARVCAALGL |
| | | NPEMIAWDKMTPYTEFLATAYLEKGGDRKVATLKPKNRPE |
| | | MLRRDIKFKGTEGVRIEVSPEAAEAYREAQWDLQRTSPEYLR |
| | | LSTWKQELTKRILNQLRHKAAKSSQCEVVVMAFEDLNIKMM |
| | | HGNGKWADGGWDAFFIKKRENRWFMQAFHKSLTELGAHK |
| | | GVPTIEVTPHRTSITCTKCGHCDKANRDGERFACQKCGFVAH |
| | | ADLEIATDNIERVALTGKPMPKPESERSGDAKKSVGARKAAF |
| | | KPEEDAEAAE |
| CasΦ.12 | 12 | MIKPTVSQFLTPGFKLIRNHSRTAGLKLKNEGEEACKKFVRE |
| | | NEIPKDECPNFQGGPAIANIIAKSREFTEWEIYQSSLAIQEVIFT |
| | | LPKDKLPEPILKEEWRAQWLSEHGLDTVPYKEAAGLNLIIKN |
| | | AVNTYKGVQVKVDNKNKNNLAKINRKNEIAKLNGEQEISFE |
| | | EIKAFDDKGYLLQKPSPNKSIYCYQSVSPKPFITSKYHNVNLP |
| | | EEYIGYYRKSNEPIVSPYQFDRLRIPIGEPGYVPKWQYTFLSK |
| | | KENKRRKLSKRIKNVSPILGIICIKKDWCVFDMRGLLRTNHW |
| | | KKYHKPTDSINDLFDYFTGDPVIDTKANVVRFRYKMENGIV |
| | | NYKPVREKKGKELLENICDQNGSCKLATVDVGQNNPVAIGL |
| | | FELKKVNGELTKTLISRHPTPIDFCNKITAYRERYDKLESSIKL |
| | | DAIKQLTSEQKIEVDNYNNNFTPQNTKQIVCSKLNINPNDLP |
| | | WDKMISGTHFISEKAQVSNKSEIYFTSTDKGKTKDVMKSDY |
| | | KWFQDYKPKLSKEVRDALSDIEWRLRRESLEFNKLSKSREQ |
| | | DARQLANWISSMCDVIGIENLVKKNNFFGGSGKREPGWDNF |
| | | YKPKKENRWWINAIHKALTELSQNKGKRVILLPAMRTSITCP |
| | | KCKYCDSKNRNGEKFNCLKCGIELNADIDVATENLATVAITA |
| | | QSMPKPTCERSGDAKKPVRARKAKAPEFHDKLAPSYTVVLR |
| | | EAV |
| CasΦ.13 | 13 | MRQPAEKTAFQVFRQEVIGTQKLSGGDAKTAGRLYKQGKM |
| | | EAAREWLLKGARDDVPPNFQPPAKCLVVAVSHPFEEWDISK |
| | | TNHDVQAYIYAQPLQAEGHLNGLSEKWEDTSADQHKLWFE |
| | | KTGVPDRGLPVQAINKIAKAAVNRAFGVVRKVENRNEKRRS |
| | | RDNRIAEHNRENGLTEVVREAPEVATNADGFLLHPPGIDPSIL |
| | | SYASVSPVPYNSSKHSFVRLPEEYQAYNVEPDAPIPQFVVED |
| | | RFAIPPGQPGYVPEWQRLKCSTNKHRRMRQWSNQDYKPKA |
| | | GRRAKPLEFQAHLTRERAKGALLVVMRIKEDWVVFDVRGL |
| | | LRNVEWRKVLSEEAREKLTLKGLLDLFTGDPVIDTKRGIVTF |
| | | LYKAEITKILSKRTVKTKNARDLLLRLTEPGEDGLRREVGLV |
| | | AVDLGQTHPIAAAIYRIGRTSAGALESTVLHRQGLREDQKEK |
| | | LKEYRKRHTALDSRLRKEAFETLSVEQQKEIVTVSGSGAQIT |
| | | KDKVCNYLGVDPSTLPWEKMGSYTHFISDDFLRRGGDPNIV |
| | | HFDRQPKKGKVSKKSQRIKRSDSQWVGRMRPRLSQETAKAR |
| | | MEADWAAQNENEEYKRLARSKQELARWCVNTLLQNTRCIT |
| | | QCDEIVVVIEDLNVKSLHGKGAREPGWDNFFTPKTENRWFIQ |
| | | ILHKTFSELPKHRGEHVIEGCPLRTSITCPACSYCDKNSRNGE |
| | | KFVCVACGATFHADFEVATYNLVRLATTGMPMPKSLERQG |
| | | GGEKAGGARKARKKAKQVEKIVVQANANVTMNGASLHSP |
| CasΦ.14 | 14 | MSSLPTPLELLKQKHADLFKGLQFSSKDNKMAGKVLKKDGE |
| | | EAALAFLSERGVSRGELPNFRPPAKTLVVAQSRPFEEFPIYRV |
| | | SEAIQLYVYSLSVKELETVPSGSSTKKEHQRFFQDSSVPDFGY |
| | | TSVQGLNKIFGLARGIYLGVITRGENQLQKAKSKHEALNKKR |
| | | RASGEAETEFDPTPYEYMTPERKLAKPPGVNHSIMCYVDISV |
| | | DEFDFRNPDGIVLPSEYAGYCREINTAIEKGTVDRLGHLKGG |
| | | PGYIPGHQRKESTTEGPKINFRKGRIRRSYTALYAKRDSRRVR |
| | | QGKLALPSYRHHMMRLNSNAESAILAVIFFGKDWVVFDLRG |
| | | LLRNVRWRNLFVDGSTPSTLLGMFGDPVIDPKRGVVAFCYK |
| | | EQIVPVVSKSITKMVKAPELLNKLYLKSEDPLVLVAIDLGQT |
| | | NPVGVGVYRVMNASLDYEVVTRFALESELLREIESYRQRTN |
| | | AFEAQIRAETFDAMTSEEQEEITRVRAFSASKAKENVCHRFG |
| | | MPVDAVDWATMGSNTIHIAKWVMRHGDPSLVEVLEYRKDN |
| | | EIKLDKNGVPKKVKLTDKRIANLTSIRLRFSQETSKHYNDTM |
| | | WELRRKHPVYQKLSKSKADFSRRVVNSIIRRVNHLVPRARIV |
| | | FIIEDLKNLGKVFHGSGKRELGWDSYFEPKSENRWFIQVLHK |
| | | AFSETGKHKGYYIIECWPNWTSCTCPKCSCCDSENRHGEVFR |
| | | CLACGYTCNTDFGTAPDNLVKIATTGKGLPGPKKRCKGSSK |
| | | GKNPKIARSSETGVSVTESGAPKVKKSSPTQTSQSSSQSAP |
| CasΦ.15 | 15 | MIKPTVSQFLTPGFKLIRNHSRTAGLKLKNEGEEACKKFVRE |
| | | NEIPKDECPNFQGGPAIANIIAKSREFTEWEIYQSSLAIQEVIFT |
| | | LPKDKLPEPILKEEWRAQWLSEHGLDTVPYKEAAGLNLIIKN |
| | | AVNTYKGVQVKVDNKNKNNLAKINRKNEIAKLNGEQEISFE |
| | | EIKAFDDKGYLLQKPSPNKSIYCYQSVSPKPFITSKYHNVNLP |
| | | EEYIGYYRKSNEPIVSPYQFDRLRIPIGEPGYVPKWQYTFLSK |
| | | KENKRRKLSKRIKNVSPILGIICIKKDWCVFDMRGLLRTNHW |
| | | KKYHKPTDSINDLFDYFTGDPVIDTKANVVRFRYKMENGIV |
| | | NYKPVREKKGKELLENICDQNGSCKLATVDVGQNNPVAIGL |
| | | FELKKVNGELTKTLISRHPTPIDFCNKITAYRERYDKLESSIKL |
| | | DAIKQLTSEQKIEVDNYNNNFTPQNTKQIVCSKLNINPNDLP |
| | | WDKMISGTHFISEKAQVSNKSEIYFTSTDKGKTKDVMKSDY |
| | | KWFQDYKPKLSKEVRDALSDIEWRLRRESLEFNKLSKSREQ |
| | | DARQLANWISSMCDVIGIENLVKKNNFFGGSGKREPGWDNF |
| | | YKPKKENRWWINAIHKALTELSQNKGKRVILLPAMRTSITCP |
| | | KCKYCDSKNRNGEKFNCLKCGIELNADIDVATENLATVAITA |
| | | QSMPKPTCERSGDAKKPVRARKAKAPEFHDKLAPSYTVVLR |
| | | EAV |
| CasΦ.16 | 16 | MSNKTTPPSPLSLLLRAHFPGLKFESQDYKIAGKKLRDGGPE |
| | | AVISYLTGKGQAKLKDVKPPAKAFVIAQSRPFIEWDLVRVSR |
| | | QIQEKIFGIPATKGRPKQDGLSETAFNEAVASLEVDGKSKLNE |
| | | ETRAAFYEVLGLDAPSLHAQAQNALIKSAISIREGVLKKVEN |
| | | RNEKNLSKTKRRKEAGEEATFVEEKAHDERGYLIHPPGVNQ |
| | | TIPGYQAVVIKSCPSDFIGLPSGCLAKESAEALTDYLPHDRMT |
| | | IPKGQPGYVPEWQHPLLNRRKNRRRRDWYSASLNKPKATCS |
| | | KRSGTPNRKNSRTDQIQSGRFKGAIPVLMRFQDEWVIIDIRGL |
| | | LRNARYRKLLKEKSTIPDLLSLFTGDPSIDMRQGVCTFIYKAG |
| | | QACSAKMVKTKNAPEILSELTKSGPVVLVSIDLGQTNPIAAK |
| | | VSRVTQLSDGQLSHETLLRELLSNDSSDGKEIARYRVASDRL |
| | | RDKLANLAVERLSPEHKSEILRAKNDTPALCKARVCAALGL |
| | | NPEMIAWDKMTPYTEFLATAYLEKGGDRKVATLKPKNRPE |
| | | MLRRDIKFKGTEGVRIEVSPEAAEAYREAQWDLQRTSPEYLR |
| | | LSTWKQELTKRILNQLRHKAAKSSQCEVVVMAFEDLNIKMM |
| | | HGNGKWADGGWDAFFIKKRENRWFMQAFHKSLTELGAHK |
| | | GVPTIEVTPHRTSITCTKCGHCDKANRDGERFACQKCGFVAH |
| | | ADLEIATDNIERVALTGKPMPKPESERSGDAKKSVGARKAAF |
| | | KPEEDAEAAE |
| CasΦ.17 | 17 | MYSLEMADLKSEPSLLAKLLRDRFPGKYWLPKYWKLAEKK |
| | | RLTGGEEAACEYMADKQLDSPPPNFRPPARCVILAKSRPFED |
| | | WPVHRVASKAQSFVIGLSEQGFAALRAAPPSTADARRDWLR |
| | | SHGASEDDLMALEAQLLETIMGNAISLHGGVLKKIDNANVK |
| | | AAKRLSGRNEARLNKGLQELPPEQEGSAYGADGLLVNPPGL |
| | | NLNIYCRKSCCPKPVKNTARFVGHYPGYLRDSDSILISGTMD |
| | | RLTIIEGMPGHIPAWQREQGLVKPGGRRRRLSGSESNMRQKV |
| | | DPSTGPRRSTRSGTVNRSNQRTGRNGDPLLVEIRMKEDWVL |
| | | LDARGLLRNLRWRESKRGLSCDHEDLSLSGLLALFSGDPVID |
| | | PVRNEVVFLYGEGIIPVRSTKPVGTRQSKKLLERQASMGPLT |
| | | LISCDLGQTNLIAGRASAISLTHGSLGVRSSVRIELDPEIIKSFE |
| | | RLRKDADRLETEILTAAKETLSDEQRGEVNSHEKDSPQTAKA |
| | | SLCRELGLHPPSLPWGQMGPSTTFIADMLISHGRDDDAFLSH |
| | | GEFPTLEKRKKFDKRFCLESRPLLSSETRKALNESLWEVKRTS |
| | | SEYARLSQRKKEMARRAVNFVVEISRRKTGLSNVIVNIEDLN |
| | | VRIFHGGGKQAPGWDGFFRPKSENRWFIQAIHKAFSDLAAH |
| | | HGIPVIESDPQRTSMTCPECGHCDSKNRNGVRFLCKGCGASM |
| | | DADFDAACRNLERVALTGKPMPKPSTSCERLLSATTGKVCS |
| | | DHSLSHDAIEKAS |
| CasΦ.18 | 18 | MEKEITELTKIRREFPNKKFSSTDMKKAGKLLKAEGPDAVRD |
| | | FLNSCQEIIGDFKPPVKTNIVSISRPFEEWPVSMVGRAIQEYYF |
| | | SLTKEELESVHPGTSSEDHKSFFNITGLSNYNYTSVQGLNLIF |
| | | KNAKAIYDGTLVKANNKNKKLEKKFNEINHKRSLEGLPIITP |
| | | DFEEPFDENGHLNNPPGINRNIYGYQGCAAKVFVPSKHKMV |
| | | SLPKEYEGYNRDPNLSLAGFRNRLEIPEGEPGHVPWFQRMDI |
| | | PEGQIGHVNKIQRFNFVHGKNSGKVKFSDKTGRVKRYHHSK |
| | | YKDATKPYKFLEESKKVSALDSILAIITIGDDWVVFDIRGLYR |
| | | NVFYRELAQKGLTAVQLLDLFTGDPVIDPKKGVVTFSYKEG |
| | | VVPVFSQKIVPRFKSRDTLEKLTSQGPVALLSVDLGQNEPVA |
| | | ARVCSLKNINDKITLDNSCRISFLDDYKKQIKDYRDSLDELEI |
| | | KIRLEAINSLETNQQVEIRDLDVFSADRAKANTVDMFDIDPN |
| | | LISWDSMSDARVSTQISDLYLKNGGDESRVYFEINNKRIKRS |
| | | DYNISQLVRPKLSDSTRKNLNDSIWKLKRTSEEYLKLSKRKL |
| | | ELSRAVVNYTIRQSKLLSGINDIVIILEDLDVKKKFNGRGIRDI |
| | | GWDNFFSSRKENRWFIPAFHKTFSELSSNRGLCVIEVNPAWT |
| | | SATCPDCGFCSKENRDGINFTCRKCGVSYHADIDVATLNIAR |
| | | VAVLGKPMSGPADRERLGDTKKPRVARSRKTMKRKDISNST |
| | | VEAMVTA |
| CasΦ.19 | 19 | MLVRTSTLVQDNKNSRSASRAFLKKPKMPKNKHIKEPTELA |
| | | KLIRELFPGQRFTRAINTQAGKILKHKGRDEVVEFLKNKGIDK |
| | | EQFMDFRPPTKARIVATSGAIEEFSYLRVSMAIQECCFGKYKF |
| | | PKEKVNGKLVLETVGLTKEELDDFLPKKYYENKKSRDRFFL |
| | | KTGICDYGYTYAQGLNEIFRNTRAIYEGVFTKVNNRNEKRRE |
| | | KKDKYNEERRSKGLSEEPYDEDESATDESGHLINPPGVNLNI |
| | | WTCEGFCKGPYVTKLSGTPGYEVILPKVFDGYNRDPNEIISC |
| | | GITDRFAIPEGEPGHIPWHQRLEIPEGQPGYVPGHQRFADTGQ |
| | | NNSGKANPNKKGRMRKYYGHGTKYTQPGEYQEVFRKGHRE |
| | | GNKRRYWEEDFRSEAHDCILYVIHIGDDWVVCDLRGPLRDA |
| | | YRRGLVPKEGITTQELCNLFSGDPVIDPKHGVVTFCYKNGLV |
| | | RAQKTISAGKKSRELLGALTSQGPIALIGVDLGQTEPVGARAF |
| | | IVNQARGSLSLPTLKGSFLLTAENSSSWNVFKGEIKAYREAID |
| | | DLAIRLKKEAVATLSVEQQTEIESYEAFSAEDAKQLACEKFG |
| | | VDSSFILWEDMTPYHTGPATYYFAKQFLKKNGGNKSLIEYIP |
| | | YQKKKSKKTPKAVLRSDYNIACCVRPKLLPETRKALNEAIRI |
| | | VQKNSDEYQRLSKRKLEFCRRVVNYLVRKAKKLTGLERVII |
| | | AIEDLKSLEKFFTGSGKRDNGWSNFFRPKKENRWFIPAFHKA |
| | | FSELAPNRGFYVIECNPARTSITDPDCGYCDGDNRDGIKFECK |
| | | KCGAKHHTDLDVAPLNIAIVAVTGRPMPKTVSNKSKRERSG |
| | | GEKSVGASRKRNHRKSKANQEMLDATSSAAE |
| CasΦ.20 | 20 | MPKIKKPTEISLLRKEVFPDLHFAKDRMRAASLVLKNEGREA |
| | | AIEYLRVNHEDKPPNFMPPAKTPYVALSRPLEQWPIAQASIAI |
| | | QKYIFGLTKDEFSATKKLLYGDKSTPNTESRKRWFEVTGVPN |
| | | FGYMSAQGLNAIFSGALARYEGVVQKVENRNKKRFEKLSEK |
| | | NQLLIEEGQPVKDYVPDTAYHTPETLQKLAENNHVRVEDLG |
| | | DMIDRLVHPPGIHRSIYGYQQVPPFAYDPDNPKGIILPKAYAG |
| | | YTRKPHDIIEAMPNRLNIPEGQAGYIPEHQRDKLKKGGRVKR |
| | | LRTTRVRVDATETVRAKAEALNAEKARLRGKEAILAVFQIEE |
| | | DWALIDMRGLLRNVYMRKLIAAGELTPTTLLGYFTETLTLDP |
| | | RRTEATFCYHLRSEGALHAEYVRHGKNTRELLLDLTKDNEKI |
| | | ALVTIDLGQRNPLAAAIFRVGRDASGDLTENSLEPVSRMLLP |
| | | QAYLDQIKAYRDAYDSFRQNIWDTALASLTPEQQRQILAYE |
| | | AYTPDDSKENVLRLLLGGNVMPDDLPWEDMTKNTHYISDR |
| | | YLADGGDPSKVWFVPGPRKRKKNAPPLKKPPKPRELVKRSD |
| | | HNISHLSEFRPQLLKETRDAFEKAKIDTERGHVGYQKLSTRK |
| | | DQLCKEILNWLEAEAVRLTRCKTMVLGLEDLNGPFFNQGKG |
| | | KVRGWVSFFRQKQENRWIVNGFRKNALARAHDKGKYILEL |
| | | WPSWTSQTCPKCKHVHADNRHGDDFVCLQCGARLHADAEV |
| | | ATWNLAVVAIQGHSLPGPVREKSNDRKKSGSARKSKKANES |
| | | GKVVGAWAAQATPKRATSKKETGTARNPVYNPLETQASCP |
| | | AP |
| CasΦ.21 | 21 | MTPSPQIARLVETPLAAALKAHHPGKKFRSDYLKKAGKILKD |
| | | QGVEAAMAHLDGKDQAEPPNFKPPAKCRIVARSREFSEWPI |
| | | VKASVEIQKYIYGLTLEERKACDPGKSSASHKAWFAKTGVN |
| | | TFGYSSVQGFNLIFGHTLGRYDGVLVKTENLNKKRAEKNER |
| | | FRAKALAEGRAEPVCPPLVTATNDTGQDVTLEDGRVVRPGQ |
| | | LLQPPGINPNIYAYQQVSPKAYVPGIIELPEEFQGYSRDPNAVI |
| | | LPLVPRDRLSIPKGQPGYVPEPHREGLTGRKDRRMRRYYETE |
| | | RGTKLKRPPLTAKGRADKANEALLVVVRIDSDWVVMDVRG |
| | | LLRNARWRRLVSKEGITLNGLLDLFTGDPVLNPKDCSVSRDT |
| | | GDPVNDPRHGVVTFCYKLGVVDVCSKDRPIKGFRTKEVLER |
| | | LTSSGTVGMVSIDLGQTNPVAAAVSRVTKGLQAETLETFTLP |
| | | DDLLGKVRAYRAKTDRMEEGFRRNALRKLTAEQQAEITRYN |
| | | DATEQQAKALVCSTYGIGPEEVPWERMTSNTTYISDHILDHG |
| | | GDPDTVFFMATKRGQNKPTLHKRKDKAWGQKFRPAISVETR |
| | | LARQAAEWELRRASLEFQKLSVWKTELCRQAVNYVMERTK |
| | | KRTQCDVIIPVIEDLPVPLFHGSGKRDPGWANFFVHKRENRW |
| | | FIDGLHKAFSELGKHRGIYVFEVCPQRTSITCPKCGHCDPDNR |
| | | DGEKFVCLSCQATLNADLDVATTNLVRVALTGKVMPRSERS |
| | | GDAQTPGPARKARTGKIKGSKPTSAPQGATQTDAKAHLSQT |
| | | GV |
| CasΦ.22 | 22 | MTPSPQIARLVETPLAAALKAHHPGKKFRSDYLKKAGKILKD |
| | | QGVEAAMAHLDGKDQAEPPNFKPPAKCRIVARSREFSEWPI |
| | | VKASVEIQKYIYGLTLEERKACDPGKSSASHKAWFAKTGVN |
| | | TFGYSSVQGFNLIFGHTLGRYDGVLVKTENLNKKRAEKNER |
| | | FRAKALAEGRAEPVCPPLVTATNDTGQDVTLEDGRVVRPGQ |
| | | LLQPPGINPNIYAYQQVSPKAYVPGIIELPEEFQGYSRDPNAVI |
| | | LPLVPRDRLSIPKGQPGYVPEPHREGLTGRKDRRMRRYYETE |
| | | RGTKLKRPPLTAKGRADKANEALLVVVRIDSDWVVMDVRG |
| | | LLRNARWRRLVSKEGITLNGLLDLFTGDPVLNPKDCSVSRDT |
| | | GDPVNDPRHGVVTFCYKLGVVDVCSKDRPIKGFRTKEVLER |
| | | LTSSGTVGMVSIDLGQTNPVAAAVSRVTKGLQAETLETFTLP |
| | | DDLLGKVRAYRAKTDRMEEGFRRNALRKLTAEQQAEITRYN |
| | | DATEQQAKALVCSTYGIGPEEVPWERMTSNTTYISDHILDHG |
| | | GDPDTVFFMATKRGQNKPTLHKRKDKAWGQKFRPAISVETR |
| | | LARQAAEWELRRASLEFQKLSVWKTELCRQAVNYVMERTK |
| | | KRTQCDVIIPVIEDLPVPLFHGSGKRDPGWANFFVHKRENRW |
| | | FIDGLHKAFSELGKHRGIYVFEVCPQRTSITCPKCGHCDPDNR |
| | | DGEKFVCLSCQATLHADLDVATTNLVRVALTGKVMPRSERS |
| | | GDAQTPGPARKARTGKIKGSKPTSAPQGATQTDAKAHLSQT |
| | | GV |
| CasΦ.23 | 23 | MKTEKPKTALTLLREEVFPGKKYRLDVLKEAGKKLSTKGRE |
| | | ATIEFLTGKDEERPQNFQPPAKTSIVAQSRPFDQWPIVQVSLA |
| | | VQKYIYGLTQSEFEANKKALYGETGKAISTESRRAWFEATGV |
| | | DNFGFTAAQGINPIFSQAVARYEGVIKKVENRNEKKLKKLTK |
| | | KNLLRLESGEEIEDFEPEATFNEEGRLLQPPGANPNIYCYQQIS |
| | | PRIYDPSDPKGVILPQIYAGYDRKPEDIISAGVPNRLAIPEGQP |
| | | GYIPEHQRAGLKTQGRIRCRASVEAKARAAILAVVHLGEDW |
| | | VVLDLRGLLRNVYWRKLASPGTLTLKGLLDFFTGGPVLDAR |
| | | RGIATFSYTLKSAAAVHAENTYKGKGTREVLLKLTENNSVA |
| | | LVTVDLGQRNPLAAMIARVSRTSQGDLTYPESVEPLTRLFLP |
| | | DPFLEEVRKYRSSYDALRLSIREAAIASLTPEQQAEIRYIEKFS |
| | | AGDAKKNVAEVFGIDPTQLPWDAMTPRTTYISDLFLRMGGD |
| | | RSRVFFEVPPKKAKKAPKKPPKKPAGPRIVKRTDGMIARLREI |
| | | RPRLSAETNKAFQEARWEGERSNVAFQKLSVRRKQFARTVV |
| | | NHLVQTAQKMSRCDTVVLGIEDLNVPFFHGRGKYQPGWEG |
| | | FFRQKKENRWLINDMHKALSERGPHRGGYVLELTPFWTSLR |
| | | CPKCGHTDSANRDGDDFVCVKCGAKLHSDLEVATANLALV |
| | | AITGQSIPRPPREQSSGKKSTGTARMKKTSGETQGKGSKACV |
| | | SEALNKIEQGTARDPVYNPLNSQVSCPAP |
| CasΦ.24 | 24 | VYNPDMKKPNNIRRIREEHFEGLCFGKDVLTKAGKIYEKDGE |
| | | EAAIDFLMGKDEEDPPNFKPPAKTTIVAQSRPFDQWPIYQVS |
| | | QAVQERVFAYTEEEFNASKEALFSGDISSKSRDFWFKTNNIS |
| | | DQGIGAQGLNTILSHAFSRYSGVIKKVENRNKKRLKKLSKKN |
| | | QLKIEEGLEILEFKPDSAFNENGLLAQPPGINPNIYGYQAVTPF |
| | | VFDPDNPGDVILPKQYEGYSRKPDDIIEKGPSRLDIPKGQPGY |
| | | VPEHQRKNLKKKGRVRLYRRTPPKTKALASILAVLQIGKDW |
| | | VLFDMRGLLRSVYMREAATPGQISAKDLLDTFTGCPVLNTR |
| | | TGEFTFCYKLRSEGALHARKIYTKGETRTLLTSLTSENNTIAL |
| | | VTVDLGQRNPAAIMISRLSRKEELSEKDIQPVSRRLLPDRYLN |
| | | ELKRYRDAYDAFRQEVRDEAFTSLCPEHQEQVQQYEALTPE |
| | | KAKNLVLKHFFGTHDPDLPWDDMTSNTHYIANLYLERGGDP |
| | | SKVFFTRPLKKDSKSKKPRKPTKRTDASISRLPEIRPKMPEDA |
| | | RKAFEKAKWEIYTGHEKFPKLAKRVNQLCREIANWIEKEAK |
| | | RLTLCDTVVVGIEDLSLPPKRGKGKFQETWQGFFRQKFENR |
| | | WVIDTLKKAIQNRAHDKGKYVLGLAPYWTSQRCPACGFIHK |
| | | SNRNGDHFKCLKCEALFHADSEVATWNLALVAVLGKGITNP |
| | | DSKKPSGQKKTGTTRKKQIKGKNKGKETVNVPPTTQEVEDII |
| | | AFFEKDDETVRNPVYKPTGT |
| CasΦ.25 | 25 | MKKPNNIRRIREEHFEGLCFGKDVLTKAGKIYEKDGEEAAID |
| | | FLMGKDEEDPPNFKPPAKTTIVAQSRPFDQWPIYQVSQAVQE |
| | | RVFAYTEEEFNASKEALFSGDISSKSRDFWFKTNNISDQGIGA |
| | | QGLNTILSHAFSRYSGVIKKVENRNKKRLKKLSKKNQLKIEE |
| | | GLEILEFKPDSAFNENGLLAQPPGINPNIYGYQAVTPFVFDPD |
| | | NPGDVILPKQYEGYSRKPDDIIEKGPSRLDIPKGQPGYVPEHQ |
| | | RKNLKKKGRVRLYRRTPPKTKALASILAVLQIGKDWVLFDM |
| | | RGLLRSVYMREAATPGQISAKDLLDTFTGCPVLNTRTGEFTF |
| | | CYKLRSEGALHARKIYTKGETRTLLTSLTSENNTIALVTVDL |
| | | GQRNPAAIMISRLSRKEELSEKDIQPVSRRLLPDRYLNELKRY |
| | | RDAYDAFRQEVRDEAFTSLCPEHQEQVQQYEALTPEKAKNL |
| | | VLKHFFGTHDPDLPWDDMTSNTHYIANLYLERGGDPSKVFF |
| | | TRPLKKDSKSKKPRKPTKRTDASISRLPEIRPKMPEDARKAFE |
| | | KAKWEIYTGHEKFPKLAKRVNQLCREIANWIEKEAKRLTLC |
| | | DTVVVGIEDLSLPPKRGKGKFQETWQGFFRQKFENRWVIDT |
| | | LKKAIQNRAHDKGKYVLGLAPYWTSQRCPACGFIHKSNRNG |
| | | DHFKCLKCEALFHADSEVATWNLALVAVLGKGITNPDSKKP |
| | | SGQKKTGTTRKKQIKGKNKGKETVNVPPTTQEVEDIIAFFEK |
| | | DDETVRNPVYKPTGT |
| CasΦ.26 | 26 | VIKTHFPAGRFRKDHQKTAGKKLKHEGEEACVEYLRNKVSD |
| | | YPPNFKPPAKGTIVAQSRPFSEWPIVRASEAIQKYVYGLTVAE |
| | | LDVFSPGTSKPSHAEWFAKTGVENYGYRQVQGLNTIFQNTV |
| | | NRFKGVLKKVENRNKKSLKRQEGANRRRVEEGLPEVPVTVE |
| | | SATDDEGRLLQPPGVNPSIYGYQGVAPRVCTDLQGFSGMSV |
| | | DFAGYRRDPDAVLVESLPEGRLSIPKGERGYVPEWQRDPERN |
| | | KFPLREGSRRQRKWYSNACHKPKPGRTSKYDPEALKKASAK |
| | | DALLVSISIGEDWAIIDVRGLLRDARRRGFTPEEGLSLNSLLG |
| | | LFTEYPVFDVQRGLITFTYKLGQVDVHSRKTVPTFRSRALLES |
| | | LVAKEEIALVSVDLGQTNPASMKVSRVRAQEGALVAEPVHR |
| | | MFLSDVLLGELSSYRKRMDAFEDAIRAQAFETMTPEQQAEIT |
| | | RVCDVSVEVARRRVCEKYSISPQDVPWGEMTGHSTFIVDAV |
| | | LRKGGDESLVYFKNKEGETLKFRDLRISRMEGVRPRLTKDTR |
| | | DALNKAVLDLKRAHPTFAKLAKQKLELARRCVNFIEREAKR |
| | | YTQCERVVFVIEDLNVGFFHGKGKRDRGWDAFFTAKKENR |
| | | WVIQALHKAFSDLGLHRGSYVIEVTPQRTSMTCPRCGHCDK |
| | | GNRNGEKFVCLQCGATLHADLEVATDNIERVALTGKAMPKP |
| | | PVRERSGDVQKAGTARKARKPLKPKQKTEPSVQEGSSDDGV |
| | | DKSPGDASRNPVYNPSDTLSI |
| CasΦ.27 | 27 | MAKAKTLAALLRELLPGQHLAPHHRWVANKLLMTSGDAAA |
| | | FVIGKSVSDPVRGSFRKDVITKAGRIFKKDGPDAAAAFLDGK |
| | | WEDRPPNFQPPAKAAIVAISRSFDEWPIVKVSCAIQQYLYALP |
| | | VQEFESSVPEARAQAHAAWFQDTGVDDCNFKSTQGLNAIFN |
| | | HGKRTYEGVLKKAQNRNDKKNLRLERINAKRAEAGQAPLV |
| | | AGPDESPTDDAGCLLHPPGINANIYCYQQVSPRPYEQSCGIQL |
| | | PPEYAGYNRLSNVAIPPMPNRLDIPQGQPGYVPEHHRHGIKK |
| | | FGRVRKRYGVVPGRNRDADGKRTRQVLTEAGAAAKARDSV |
| | | LAVIRIGDDWTVVDLRGLLRNAQWRKLVPDGGITVQGLLDL |
| | | FTGDPVIDPRRGVVTFIYKADSVGIHSEKVCRGKQSKNLLER |
| | | LCAMPEKSSTRLDCARQAVALVSVDLGQRNPVAARFSRVSL |
| | | AEGQLQAQLVSAQFLDDAMVAMIRSYREEYDRFESLVREQA |
| | | KAALSPEQLSEIVRHEADSAESVKSCVCAKFGIDPAGLSWDK |
| | | MTSGTWRIADHVQAAGGDVEWFFFKTCGKGKEIKTVRRSDF |
| | | NVAKQFRLRLSPETRKDWNDAIWELKRGNPAYVSFSKRKSE |
| | | FARRVVNDLVHRARRAVRCDEVVFAIEDLNISFFHGKGQRQ |
| | | MGWDAFFEVKQENRWFIQALHKAFVERATHKGGYVLEVAP |
| | | ARTSTTCPECRHCDPESRRGEQFCCIKCRHTCHADLEVATFNI |
| | | EQVALTGVSLPKRLSSTLL |
| CasΦ.28 | 28 | MSKEKTPPSAYAILKAKHFPDLDFEKKHKMMAGRMFKNGA |
| | | SEQEVVQYLQGKGSESLMDVKPPAKSPILAQSRPFDEWEMV |
| | | RTSRLIQETIFGIPKRGSIPKRDGLSETQFNELVASLEVGGKPM |
| | | LNKQTRAIFYGLLGIKPPTFHAMAQNILIDLAINIRKGVLKKV |
| | | DNLNEKNRKKVKRIRDAGEQDVMVPAEVTAHDDRGYLNHP |
| | | PGVNPTIPGYQGVVIPFPEGFEGLPSGMTPVDWSHVLVDYLP |
| | | HDRLSIPKGSPGYIPEWQRPLLNRHKGRRHRSWYANSLNKPR |
| | | KSRTEEAKDRQNAGKRTALIEAERLKGVLPVLMRFKEDWLII |
| | | DARGLLRNARYRGVLPEGSTLGNLIDLFSDSPRVDTRRGICTF |
| | | LYRKGRAYSTKPVKRKESKETLLKLTEKSTIALVSIDLGQTNP |
| | | LTAKLSKVRQVDGCLVAEPVLRKLIDNASEDGKEIARYRVA |
| | | HDLLRARILEDAIDLLGIYKDEVVRARSDTPDLCKERVCRFL |
| | | GLDSQAIDWDRMTPYTDFIAQAFVAKGGDPKVVTIKPNGKP |
| | | KMFRKDRSIKNMKGIRLDISKEASSAYREAQWAIQRESPDFQ |
| | | RLAVWQSQLTKRIVNQLVAWAKKCTQCDTVVLAFEDLNIG |
| | | MMHGSGKWANGGWNALFLHKQENRWFMQAFHKALTELS |
| | | AHKGIPTIEVLPHRTSITCTQCGHCHPGNRDGERFKCLKCEFL |
| | | ANTDLEIATDNIERVALTGLPMPKGERSSAKRKPGGTRKTKK |
| | | SKHSGNSPLAAE |
| CasΦ.29 | 29 | MEKAGPTSPLSVLIHKNFEGCRFQIDHLKIAGRKLAREGEAA |
| | | AIEYLLDKKCEGLPPNFQPPAKGNVIAQSRPFTEWAPYRASV |
| | | AIQKYIYSLSVDERKVCDPGSSSDSHEKWFKQTGVQNYGYT |
| | | HVQGLNLIFKHALARYDGVLKKVDNRNEKNRKKAERVNSF |
| | | RREEGLPEEVFEEEKATDETGHLLQPPGVNHSIYCYQSVRPK |
| | | PFNPRKPGGISLPEAYSGYSLKPQDELPIGSLDRLSIPPGQPGY |
| | | VPEWQRSQLTTQKHRRKRSWYSAQKWKPRTGRTSTFDPDR |
| | | LNCARAQGAILAVVRIHEDWVVFDVRGLLRNALWRELAGK |
| | | GLTVRDLLDFFTGDPVVDTKRGVVTFTYKLGKVDVHSLRTV |
| | | RGKRSKKVLEDLTLSSDVGLVTIDLGQTNVLAADYSKVTRSE |
| | | NGELLAVPLSKSFLPKHLLHEVTAYRTSYDQMEEGFRRKALL |
| | | TLTEDQQVEVTLVRDFSVESSKTKLLQLGVDVTSLPWEKMS |
| | | SNTTYISDQLLQQGADPASLFFDGERDGKPCRHKKKDRTWA |
| | | YLVRPKVSPETRKALNEALWALKNTSPEFESLSKRKIQFSRR |
| | | CMNYLLNEAKRISGCGQVVFVIEDLNVRVHHGRGKRAIGWD |
| | | NFFKPKRENRWFMQALHKAASELAIHRGMHIIEACPARSSIT |
| | | CPKCGHCDPENRCSSDREKFLCVKCGAAFHADLEVATFNLR |
| | | KVALTGTALPKSIDHSRDGLIPKGARNRKLKEPQANDEKACA |
| CasΦ.30 | 30 | MKEQSPLSSVLKSNFPGKKFLSADIRVAGRKLAQLGEAAAVE |
| | | YLSPRQRDSVPNFRPPAFCTVVAKSRPFEEWPIYKASVLLQE |
| | | QIYGMTGQEFEERCGSIPTSLSGLRQWASSVGLGAAMEGLH |
| | | VQGMNLMVKNAINRYKGVLVKVENRNKKLVEANEAKNSS |
| | | REERGLPPLRPPELGSAFGPDGRLVNPPGIDKSIRLYQGVSPV |
| | | PVVKTTGRPTVHRLDIPAGEKGHVPLWQREAGLVKEGPRRR |
| | | RMWYSNSNLKRSRKDRSAEASEARKADSVVVRVSVKEDWV |
| | | DIDVRGLLRNVAWRGIERAGESTEDLLSLFSGDPVVDPSRDS |
| | | VVFLYKEGVVDVLSKKVVGAGKSRKQLEKMVSEGPVALVS |
| | | CDLGQTNYVAARVSVLDESLSPVRSFRVDPREFPSADGSQGV |
| | | VGSLDRIRADSDRLEAKLLSEAEASLPEPVRAEIEFLRSERPSA |
| | | VAGRLCLKLGIDPRSIPWEKMGSTTSFISEALSAKGSPLALHD |
| | | GAPIKDSRFAHAARGRLSPESRKALNEALWERKSSSREYGVI |
| | | SRRKSEASRRMANAVLSESRRLTGLAVVAVNLEDLNMVSKF |
| | | FHGRGKRAPGWAGFFTPKMENRWFIRSIHKAMCDLSKHRGI |
| | | TVIESRPERTSISCPECGHCDPENRSGERFSCKSCGVSLHADFE |
| | | VATRNLERVALTGKPMPRRENLHSPEGATASRKTRKKPREA |
| | | TASTFLDLRSVLSSAENEGSGPAARAG |
| CasΦ.31 | 31 | MLPPSNKIGKSMSLKEFINKRNFKSSIIKQAGKILKKEGEEAV |
| | | KKYLDDNYVEGYKKRDFPITAKCNIVASNRKIEDFDISKFSSF |
| | | IQNYVFNLNKDNFEEFSKIKYNRKSFDELYKKIANEIGLEKPN |
| | | YENIQGEIAVIRNAINIYNGVLKKVENRNKKIQEKNQSKDPPK |
| | | LLSAFDDNGFLAERPGINETIYGYQSVRLRHLDVEKDKDIIVQ |
| | | LPDIYQKYNKKSTDKISVKKRLNKYNVDEYGKLISKRRKERI |
| | | NKDDAILCVSNFGDDWIIFDARGLLRQTYRYKLKKKGLCIKD |
| | | LLNLFTGDPIINPTKTDLKEALSLSFKDGIINNRTLKVKNYKK |
| | | CPELISELIRDKGKVAMISIDLGQTNPISYRLSKFTANNVAYIE |
| | | NGVISEDDIVKMKKWREKSDKLENLIKEEAIASLSDDEQREV |
| | | RLYENDIADNTKKKILEKFNIREEDLDFSKMSNNTYFIRDCLK |
| | | NKNIDESEFTFEKNGKKLDPTDACFAREYKNKLSELTRKKIN |
| | | EKIWEIKKNSKEYHKISIYKKETIRYIVNKLIKQSKEKSECDDII |
| | | VNIEKLQIGGNFFGGRGKRDPGWNNFFLPKEENRWFINACH |
| | | KAFSELAPHKGIIVIESDPAYTSQTCPKCENCDKENRNGEKFK |
| | | CKKCNYEANADIDVATENLEKIAKNGRRLIKNFDQLGERLPG |
| | | AEMPGGARKRKPSKSLPKNGRGAGVGSEPELINQSPSQVIA |
| CasΦ.32 | 32 | VPDKKETPLVALCKKSFPGLRFKKHDSRQAGRILKSKGEGAA |
| | | VAFLEGKGGTTQPNFKPPVKCNIVAMSRPLEEWPIYKASVVI |
| | | QKYVYAQSYEEFKATDPGKSEAGLRAWLKATRVDTDGYFN |
| | | VQGLNLIFQNARATYEGVLKKVENRNSKKVAKIEQRNEHRA |
| | | ERGLPLLTLDEPETALDETGHLRHRPGINCSVFGYQHMKLKP |
| | | YVPGSIPGVTGYSRDPSTPIAACGVDRLEIPEGQPGYVPPWDR |
| | | ENLSVKKHRRKRASWARSRGGAIDDNMLLAVVRVADDWA |
| | | LLDLRGLLRNTQYRKLLDRSVPVTIESLLNLVTNDPTLSVVK |
| | | KPGKPVRYTATLIYKQGVVPVVKAKVVKGSYVSKMLDDTT |
| | | ETFSLVGVDLGVNNLIAANALRIRPGKCVERLQAFTLPEQTV |
| | | EDFFRFRKAYDKHQENLRLAAVRSLTAEQQAEVLALDTFGP |
| | | EQAKMQVCGHLGLSVDEVPWDKVNSRSSILSDLAKERGVD |
| | | DTLYMFPFFKGKGKKRKTEIRKRWDVNWAQHFRPQLTSETR |
| | | KALNEAKWEAERNSSKYHQLSIRKKELSRHCVNYVIRTAEK |
| | | RAQCGKVIVAVEDLHHSFRRGGKGSRKSGWGGFFAAKQEG |
| | | RWLMDALFGAFCDLAVHRGYRVIKVDPYNTSRTCPECGHC |
| | | DKANRDRVNREAFICVCCGYRGNADIDVAAYNIAMVAITGV |
| | | SLRKAARASVASTPLESLAAE |
| CasΦ.33 | 33 | MSKTKELNDYQEALARRLPGVRHQKSVRRAARLVYDRQGE |
| | | DAMVAFLDGKEVDEPYTLQPPAKCHILAVSRPIEEWPIARVT |
| | | MAVQEHVYALPVHEVEKSRPETTEGSRSAWFKNSGVSNHG |
| | | VTHAQTLNAILKNAYNVYNGVIKKVENRNAKKRDSLAAKN |
| | | KSRERKGLPHFKADPPELATDEQGYLLQPPSPNSSVYLVQQH |
| | | LRTPQIDLPSGYTGPVVDPRSPIPSLIPIDRLAIPPGQPGYVPLH |
| | | DREKLTSNKHRRMKLPKSLRAQGALPVCFRVFDDWAVVDG |
| | | RGLLRHAQYRRLAPKNVSIAELLELYTGDPVIDIKRNLMTFR |
| | | FAEAVVEVTARKIVEKYHNKYLLKLTEPKGKPVREIGLVSID |
| | | LNVQRLIALAIYRVHQTGESQLALSPCLHREILPAKGLGDFDK |
| | | YKSKFNQLTEEILTAAVQTLTSAQQEEYQRYVEESSHEAKAD |
| | | LCLKYSITPHELAWDKMTSSTQYISRWLRDHGWNASDFTQIT |
| | | KGRKKVERLWSDSRWAQELKPKLSNETRRKLEDAKHDLQR |
| | | ANPEWQRLAKRKQEYSRHLANTVLSMAREYTACETVVIAIE |
| | | NLPMKGGFVDGNGSRESGWDNFFTHKKENRWMIKDIHKAL |
| | | SDLAPNRGVHVLEVNPQYTSQTCPECGHRDKANRDPIQRERF |
| | | CCTHCGAQRHADLEVATHNIAMVATTGKSLTGKSLAPQRLQ |
| | | EAAE |
| CasΦ.41 | 34 | VLLSDRIQYTDPSAPIPAMTVVDRRKIKKGEPGYVPPFMRKN |
| | | LSTNKHRRMRLSRGQKEACALPVGLRLPDGKDGWDFIIFDG |
| | | RALLRACRRLRLEVTSMDDVLDKFTGDPRIQLSPAGETIVTC |
| | | MLKPQHTGVIQQKLITGKMKDRLVQLTAEAPIAMLTVDLGE |
| | | HNLVACGAYTVGQRRGKLQSERLEAFLLPEKVLADFEGYRR |
| | | DSDEHSETLRHEALKALSKRQQREVLDMLRTGADQARESLC |
| | | YKYGLDLQALPWDKMSSNSTFIAQHLMSLGFGESATHVRYR |
| | | PKRKASERTILKYDSRFAAEEKIKLTDETRRAWNEAIWECQR |
| | | ASQEFRCLSVRKLQLARAAVNWTLTQAKQRSRCPRVVVVV |
| | | EDLNVRFMHGGGKRQEGWAGFFKARSEKRWFIQALHKAYT |
| | | ELPTNRGIHVMEVNPARTSITCTKCGYCDPENRYGEDFHCRN |
| | | PKCKVRGGHVANADLDIATENLARVALSGPMPKAPKLK |
| CasΦ.34 | 35 | MTPSFGYQMIIVTPIHHASGAWATLRLLFLNPKTSGVMLGMT |
| | | KTKSAFALMREEVFPGLLFKSADLKMAGRKFAKEGREAAIE |
| | | YLRGKDEERPANFKPPAKGDIIAQSRPFDQWPIVQVSQAIQK |
| | | YIFGLTKAEFDATKTLLYGEGNHPTTESRRRWFEATGVPDFG |
| | | FTSAQGLNAIFSSALARYEGVIQKVENRNEKRLKKLSEKNQR |
| | | LVEEGHAVEAYVPETAFHTLESLKALSEKSLVPLDDLMDKID |
| | | RLAQPPGINPCLYGYQQVAPYIYDPENPRGVVLPDLYLGYCR |
| | | KPDDPITACPNRLDIPKGQPGYIPEHQRGQLKKHGRVRRFRY |
| | | TNPQAKARAKAQTAILAVLRIDEDWVVMDLRGLLRNVYFRE |
| | | VAAPGELTARTLLDTFTGCPVLNLRSNVVTFCYDIESKGALH |
| | | AEYVRKGWATRNKLLDLTKDGQSVALLSVDLGQRHPVAVM |
| | | ISRLKRDDKGDLSEKSIQVVSRTFADQYVDKLKRYRVQYDA |
| | | LRKEIYDAALVSLPPEQQAEIRAYEAFAPGDAKANVLSVMFQ |
| | | GEVSPDELPWDKMNTNTHYISDLYLRRGGDPSRVFFVPQPST |
| | | PKKNAKKPPAPRKPVKRTDENVSHMPEFRPHLSNETREAFQ |
| | | KAKWTMERGNVRYAQLSRFLNQIVREANNWLVSEAKKLTQ |
| | | CQTVVWAIEDLHVPFFHGKGKYHETWDGFFRQKKEDRWFV |
| | | NVFHKAISERAPNKGEYVMEVAPYRTSQRCPVCGFVDADNR |
| | | HGDHFKCLRCGVELHADLEVATWNIALVAVQGHGIAGPPRE |
| | | QSCGGETAGTARKGKNIKKNKGLADAVTVEAQDSEGGSKK |
| | | DAGTARNPVYIPSESQVNCPAP |
| CasΦ.35 | 36 | MKPKTPKPPKTPVAALIDKHFPGKRFRASYLKSVGKKLKNQ |
| | | GEDVAVRFLTGKDEERPPNFQPPAKSNIVAQSRPIEEWPIHKV |
| | | SVAVQEYVYGLTVAEKEACSDAGESSSSHAAWFAKTGVENF |
| | | GYTSVQGLNKIFPPTFNRFDGVIKKVENRNEKKRQKATRINE |
| | | AKRNKGQSEDPPEAEVKATDDAGYLLQPPGINHSVYGYQSIT |
| | | LCPYTAEKFPTIKLPEEYAGYHSNPDAPIPAGVPDRLAIPEGQ |
| | | PGHVPEEHRAGLSTKKHRRVRQWYAMANWKPKPKRTSKPD |
| | | YDRLAKARAQGALLIVIRIDEDWVVVDARGLLRNVRWRSLG |
| | | KREITPNELLDLFTGDPVLDLKRGVVTFTYAEGVVNVCSRST |
| | | TKGKQTKVLLDAMTAPRDGKKRQIGMVAVDLGQTNPIAAE |
| | | YSRVGKNAAGTLEATPLSRSTLPDELLREIALYRKAHDRLEA |
| | | QLREEAVLKLTAEQQAENARYVETSEEGAKLALANLGVDTS |
| | | TLPWDAMTGWSTCISDHLINHGGDTSAVFFQTIRKGTKKLET |
| | | IKRKDSSWADIVRPRLTKETREALNDFLWELKRSHEGYEKLS |
| | | KRLEELARRAVNHVVQEVKWLTQCQDIVIVIEDLNVRNFHG |
| | | GGKRGGGWSNFFTVKKENRWFMQALHKAFSDLAAHRGIPV |
| | | LEVYPARTSITCLGCGHCDPENRDGEAFVCQQCGATFHADLE |
| | | VATRNIARVALTGEAMPKAPAREQPGGAKKRGTSRRRKLTE |
| | | VAVKSAEPTIHQAKNQQLNGTSRDPVYKGSELPAL |
| CasΦ.43 | 37 | MSEITDLLKANFKGKTFKSADMRMAGRILKKSGAQAVIKYL |
| | | SDKGAVDPPDFRPPAKCNIIAQSRPFDEWPICKASMAIQQHIY |
| | | GLTKNEFDESSPGTSSASHEQWFAKTGVDTHGFTHVQGLNLI |
| | | FQHAKKRYEGVIKKVENYNEKERKKFEGINERRSKEGMPLL |
| | | EPRLRTAFGDDGKFAEKPGVNPSIYLYQQTSPRPYDKTKHPY |
| | | VHAPFELKEITTIPTQDDRLKIPFGAPGHVPEKHRSQLSMAKH |
| | | KRRRAWYALSQNKPRPPKDGSKGRRSVRDLADLKAASLAD |
| | | AIPLVSRVGFDWVVIDGRGLLRNLRWRKLAHEGMTVEEML |
| | | GFFSGDPVIDPRRNVATFIYKAEHATVKSRKPIGGAKRAREEL |
| | | LKATASSDGVIRQVGLISVDLGQTNPVAYEISRMHQANGELV |
| | | AEHLEYGLLNDEQVNSIQRYRAAWDSMNESFRQKAIESLSM |
| | | EAQDEIMQASTGAAKRTREAVLTMFGPNATLPWSRMSSNTT |
| | | CISDALIEVGKEEETNFVTSNGPRKRTDAQWAAYLRPRVNPE |
| | | TRALLNQAVWDLMKRSDEYERLSKRKLEMARQCVNFVVAR |
| | | AEKLTQCNNIGIVLENLVVRNFHGSGRRESGWEGFFEPKREN |
| | | RWFMQVLHKAFSDLAQHRGVMVFEVHPAYSSQTCPACRYV |
| | | DPKNRSSEDRERFKCLKCGRSFNADREVATFNIREIARTGVG |
| | | LPKPDCERSRGVQTTGTARNPGRSLKSNKNPSEPKRVLQSKT |
| | | RKKITSTETQNEPLATDLKT |
| CasΦ.44 | 38 | MTPKTESPLSALCKKHFPGKRFRTNYLKDAGKILKKHGEDA |
| | | VVAFLSDKQEDEPANFCPPAKVHILAQSRPFEDWPINLASKAI |
| | | QTYVYGLTADERKTCEPGTSKESHDRWFKETGVDHHGFTSV |
| | | QGLNLIFKHTLNRYDGVIKKVETRNEKRRSSVVRINEKKAAE |
| | | GLPLIAAEAEETAFGEDGRLLQPPGVNHSIYCFQQVSPQPYSS |
| | | KKHPQVVLPHAVQGVDPDAPIPVGRPNRLDIPKGQPGYVPE |
| | | WQRPHLSMKCKRVRMWYARANWRRKPGRRSVLNEARLKE |
| | | ASAKGALPIVLVIGDDWLVMDARGLLRSVFWRRVAKPGLSL |
| | | SELLNVTPTGLFSGDPVIDPKRGLVTFTSKLGVVAVHSRKPTR |
| | | GKKSKDLLLKMTKPTDDGMPRHVGMVAIDLGQTNPVAAEY |
| | | SRVVQSDAGTLKQEPVSRGVLPDDLLKDVARYRRAYDLTEE |
| | | SIRQEAIALLSEGHRAEVTKLDQTTANETKRLLVDRGVSESLP |
| | | WEKMSSNTTYISDCLVALGKTDDVFFVPKAKKGKKETGIAV |
| | | KRKDHGWSKLLRPRTSPEARKALNENQWAVKRASPEYERLS |
| | | RRKLELGRRCVNHIIQETKRWTQCEDIVVVLEDLNVGFFHGS |
| | | GKRPDGWDNFFVSKRENRWFIQVLHKAFGDLATHRGTHVIE |
| | | VHPARTSITCIKCGHCDAGNRDGESFVCLASACGDRRHADLE |
| | | VATRNVARVAITGERMPPSEQARDVQKAGGARKRKPSARN |
| | | VKSSYPAVEPAPASP |
| CasΦ.36 | 39 | MSDNKMKKLSKEEKPLTPLQILIRKYIDKSQYPSGFKTTIIKQ |
| | | AGVRIKSVKSEQDEINLANWIISKYDPTYIKRDFNPSAKCQIIA |
| | | TSRSVADFDIVKMSNKVQEIFFASSHLDKNVFDIGKSKSDHD |
| | | SWFERNNVDRGIYTYSNVQGMNLIFSNTKNTYLGVAVKAQN |
| | | KFSSKMKRIQDINNFRITNHQSPLPIPDEIKIYDDAGFLLNPPG |
| | | VNPNIFGYQSCLLKPLENKEIISKTSFPEYSRLPADMIEVNYKI |
| | | SNRLKFSNDQKGFIQFKDKLNLFKINSQELFSKRRRLSGQPIL |
| | | LVASFGDDWVVLDGRGLLRQVYYRGIAKPGSITISELLGFFT |
| | | GDPIVDPIRGVVSLGFKPGVLSQETLKTTSARIFAEKLPNLVL |
| | | NNNVGLMSIDLGQTNPVSYRLSEITSNMSVEHICSDFLSQDQI |
| | | SSIEKAKTSLDNLEEEIAIKAVDHLSDEDKINFANFSKLNLPED |
| | | TRQSLFEKYPELIGSKLDFGSMGSGTSYIADELIKFENKDAFY |
| | | PSGKKKFDLSFSRDLRKKLSDETRKSYNDALFLEKRTNDKYL |
| | | KNAKRRKQIVRTVANSLVSKIEELGLTPVINIENLAMSGGFFD |
| | | GRGKREKGWDNFFKVKKENRWVMKDFHKAFSELSPHHGVI |
| | | VIESPPYCTSVTCTKCNFCDKKNRNGHKFTCQRCGLDANAD |
| | | LDIATENLEKVAISGKRMPGSERSSDERKVAVARKAKSPKGK |
| | | AIKGVKCTITDEPALLSANSQDCSQSTS |
| CasΦ.37 | 40 | MALSLAEVRERHFKGLRFRSSYLKRAGKILKKEGEAACVAY |
| | | LTGKDEESPPNFKPPAKCDVVAQSRPFEEWPIVQASVAVQSY |
| | | VYGLTKEAFEAFNPGTTKQSHEACLAATGIDTCGYSNVQGL |
| | | NLIFRQAKNRYEGVITKVENRNKKAKKKLTRKNEWRQKNG |
| | | HSELPEAPEELTFNDEGRLLQPPGINPSLYTYQQISPTPWSPKD |
| | | SSILPPQYAGYERDPNAPIPFGVAKDRLTIASGCPGYIPEWMR |
| | | TAGEKTNPRTQKKFMHPGLSTRKNKRMRLPRSVRSAPLGAL |
| | | LVTIHLGEDWLVLDVRGLLRNARWRGVAPKDISTQGLLNLF |
| | | TGDPVIDTRRGVVTFTYKPETVGIHSRTWLYKGKQTKEVLEK |
| | | LTQDQTVALVAIDLGQTNPVSAAASRVSRSGENLSIETVDRF |
| | | FLPDELIKELRLYRMAHDRLEERIREESTLALTEAQQAEVRAL |
| | | EHVVRDDAKNKVCAAFNLDAASLPWDQMTSNTTYLSEAIL |
| | | AQGVSRDQVFFTPNPKKGSKEPVEVMRKDRAWVYAFKAKL |
| | | SEETRKAKNEALWALKRASPDYARLSKRREELCRRSVNMVI |
| | | NRAKKRTQCQVVIPVLEDLNIGFFHGSGKRLPGWDNFFVAK |
| | | KENRWLMNGLHKSFSDLAVHRGFYVFEVMPHRTSITCPACG |
| | | HCDSENRDGEAFVCLSCKRTYHADLDVATHNLTQVAGTGLP |
| | | MPEREHPGGTKKPGGSRKPESPQTHAPILHRTDYSESADRLG |
| | | s |
| CasΦ.45 | 41 | QAVIKYLSDKGAVDPPDFRPPAKCNIIAQSRPFDEWPICKASM |
| | | AIQQHIYGLTKNEFDESSPGTSSASHEQWFAKTGVDTHGFTH |
| | | VQGLNLIFQHAKKRYEGVIKKVENYNEKERKKFEGINERRSK |
| | | EGMPLLEPRLRTAFGDDGKFAEKPGVNPSIYLYQQTSPRPYD |
| | | KTKHPYVHAPFELKEITTIPTQDDRLKIPFGAPGHVPEKHRSQ |
| | | LSMAKHKRRRAWYALSQNKPRPPKDGSKGRRSVRDLADLK |
| | | AASLADAIPLVSRVGFDWVVIDGRGLLRNLRWRKLAHEGMT |
| | | VEEMLGFFSGDPVIDPRRNVATFIYKAEHATVKSRKPIGGAK |
| | | RAREELLKATASSDGVIRQVGLISVDLGQTNPVAYEISRMHQ |
| | | ANGELVAEHLEYGLLNDEQVNSIQRYRAAWDSMNESFRQK |
| | | AIESLSMEAQDEIMQASTGAAKRTREAVLTMFGPNATLPWS |
| | | RMSSNTTCISDALIEVGKEEETNFVTSNGPRKRTDAQWAAYL |
| | | RPRVNPETRALLNQAVWDLMKRSDEYERLSKRKLEMARQC |
| | | VNFVVARAEKLTQCNNIGIVLENLVVRNFHGSGRRESGWEG |
| | | FFEPKRENRWFMQVLHKAFSDLAQHRGVMVFEVHPAYSSQ |
| | | TCPACRYVDPKNRSSEDRERFKCLKCGRSFNADREVATFNIR |
| | | EIARTGVGLPKPDCERSRDVQTPGTARKSGRSLKSQDNLSEP |
| | | KRVLQSKTRKKITSTETQNEPLATDLKT |
| CasΦ.38 | 42 | MIKEQSELSKLIEKYYPGKKFYSNDLKQAGKHLKKSEHLTAK |
| | | ESEELTVEFLKSCKEKLYDFRPPAKALIISTSRPFEEWPIYKAS |
| | | ESIQKYIYSLTKEELEKYNISTDKTSQENFFKESLIDNYGFANV |
| | | SGLNLIFQHTKAIYDGVLKKVNNRNNKILKKYKRKIEEGIEID |
| | | SPELEKAIDESGHFINPPGINKNIYCYQQVSPTIFNSFKETKIICP |
| | | FNYKRNPNDIIQKGVIDRLAIPFGEPGYIPDHQRDKVNKHKK |
| | | RIRKYYKNNENKNKDAILAKINIGEDWVLFDLRGLLRNAYW |
| | | RKLIPKQGITPQQLLDMFSGDPVIDPIKNNITFIYKESIIPIHSESI |
| | | IKTKKSKELLEKLTKDEQIALVSIDLGQTNPVAARFSRLSSDL |
| | | KPEHVSSSFLPDELKNEICRYREKSDLLEIEIKNKAIKMLSQEQ |
| | | QDEIKLVNDISSEELKNSVCKKYNIDNSKIPWDKMNGFTTFIA |
| | | DEFINNGGDKSLVYFTAKDKKSKKEKLVKLSDKKIANSFKPK |
| | | ISKETREILNKITWDEKISSNEYKKLSKRKLEFARRATNYLIN |
| | | QAKKATRLNNVVLVVEDLNSKFFHGSGKREDGWDNFFIPKK |
| | | ENRWFIQALHKSLTDVSIHRGINVIEVRPERTSITCPKCGCCD |
| | | KENRKGEDFKCIKCDSVYHADLEVATFNIEKVAITGESMPKP |
| | | DCERLGGEESIG |
| CasΦ.39 | 43 | VAFLDGKEVDEPYTLQPPAKCHILAVSRPIEEWPIARVTMAV |
| | | QEHVYALPVHEVEKSRPETTEGSRSAWFKNSGVSNHGVTHA |
| | | QTLNAILKNAYNVYNGVIKKVENRNAKKRDSLAAKNKSRER |
| | | KGLPHFKADPPELATDEQGYLLQPPSPNSSVYLVQQHLRTPQ |
| | | IDLPSGYTGPVVDPRSPIPSLIPIDRLAIPPGQPGYVPLHDREKL |
| | | TSNKHRRMKLPKSLRAQGALPVCFRVFDDWAVVDGRGLLR |
| | | HAQYRRLAPKNVSIAELLELYTGDPVIDIKRNLMTFRFAEAV |
| | | VEVTARKIVEKYHNKYLLKLTEPKGKPVREIGLVSIDLNVQR |
| | | LIALAIYRVHQTGESQLALSPCLHREILPAKGLGDFDKYKSKF |
| | | NQLTEEILTAAVQTLTSAQQEEYQRYVEESSHEAKADLCLKY |
| | | SITPHELAWDKMTSSTQYISRWLRDHGWNASDFTQITKGRK |
| | | KVERLWSDSRWAQELKPKLSNETRRKLEDAKHDLQRANPE |
| | | WQRLAKRKQEYSRHLANTVLSMAREYTACETVVIAIENLPM |
| | | KGGFVDGNGSRESGWDNFFTHKKENRWMIKDIHKALSDLAP |
| | | NRGVHVLEVNPQYTSQTCPECGHRDKANRDPIQRERFCCTH |
| | | CGAQRHADLEVATHNIAMVATTGKSLTGKSLAPQRLQ |
| CasΦ.42 | 44 | LEIPEGEPGHVPWFQRMDIPEGQIGHVNKIQRFNFVHGKNSG |
| | | KVKFSDKTGRVKRYHHSKYKDATKPYKFLEESKKVSALDSI |
| | | LAIITIGDDWVVFDIRGLYRNVFYRELAQKGLTAVQLLDLFT |
| | | GDPVIDPKKGIITFSYKEGVVPVFSQKIVSRFKSRDTLEKLTSQ |
| | | GPVALLSVDLGQNEPVAARVCSLKNINDKIALDNSCRIPFLD |
| | | DYKKQIKDYRDSLDELEIKIRLEAINSLDVNQQVEIRDLDVFS |
| | | ADRAKASTVDMFDIDPNLISWDSMSDARFSTQISDLYLKNGG |
| | | DESRVYFEINNKRIKRSDYNISQLVRPKLSDSTRKNLNDSIWK |
| | | LKRTSEEYLKLSKRKLELSRAVVNYTIRQSKLLSGINDIVIILE |
| | | DLDVKKKFNGRGIRDIGWDNFFSSRKENRWFIPAFHKSFSEL |
| | | SSNRGLCVIEVNPAWTSATCPDCGFCSKENRDGINFTCRKCG |
| | | VSYHADIDVATLNIARVAVLGKPMSGPADRERLGGTKKPRV |
| | | ARSRKDMKRKDISNGTVEVMVTA |
| CasΦ.46 | 45 | IPSFGYLDRLKIAKGQPGYIPEWQRETINPSKKVRRYWATNH |
| | | EKIRNAIPLVVFIGDDWVIIDGRGLLRDARRRKLADKNTTIEQ |
| | | LLEMVSNDPVIDSTRGIATLSYVEGVVPVRSFIPIGEKKGREY |
| | | LEKSTQKESVTLLSVDIGQINPVSCGVYKVSNGCSKIDFLDKF |
| | | FLDKKHLDAIQKYRTLQDSLEASIVNEALDEIDPSFKKEYQNI |
| | | NSQTSNDVKKSLCTEYNIDPEAISWQDITAHSTLISDYLIDNNI |
| | | TNDVYRTVNKAKYKTNDFGWYKKFSAKLSKEAREALNEKI |
| | | WELKIASSKYKKLSVRKKEIARTIANDCVKRAETYGDNVVV |
| | | AMESLTKNNKVMSGRGKRDPGWHNLGQAKVENRWFIQAIS |
| | | SAFEDKATHHGTPVLKVNPAYTSQTCPSCGHCSKDNRSSKD |
| | | RTIFVCKSCGEKFNADLDVATYNIAHVAFSGKKLSPPSEKSSA |
| | | TKKPRSARKSKKSRKS |
| CasΦ.47 | 46 | SPIEKLLNGLLVKITFGNDWIICDARGLLDNVQKGIIHKSYFT |
| | | NKSSLVDLIDLFTCNPIVNYKNNVVTFCYKEGVVDVKSFTPI |
| | | KSGPKTQENLIKKLKYSRFQNEKDACVLGVGVDVGVTNPFA |
| | | INGFKMPVDESSEWVMLNEPLFTIETSQAFREEIMAYQQRTD |
| | | EMNDQFNQQSIDLLPPEYKVEFDNLPEDINEVAKYNLLHTLN |
| | | IPNNFLWDKMSNTTQFISDYLIQIGRGTETEKTITTKKGKEKIL |
| | | TIRDVNWFNTFKPKISEETGKARTEIKRDLQKNSDQFQKLAK |
| | | SREQSCRTWVNNVTEEAKIKSGCPLIIFVIEALVKDNRVFSGK |
| | | GHRAIGWHNFGKQKNERRWWVQAIHKAFQEQGVNHGYPVI |
| | | LCPPQYTSQTCPKCNHVDRDNRSGEKFKCLKYGWIGNADLD |
| | | VGAYNIARVAITGKALSKPLEQKKIKKAKNKT |
| CasΦ.48 | 47 | LLDNVQKGIIHKSYFTNKSSLVDLIDLFTCNPIVNYKNNVVTF |
| | | CYKEGVVDVKSFTPIKSGPKTQENLIKKLKYSRFQNEKDACV |
| | | LGVGVDVGVTNPFAINGFKMPVDESSEWVMLNEPLFTIETSQ |
| | | AFREEIMAYQQRTDEMNDQFNQQSIDLLPPEYKVEFDNLPED |
| | | INEVAKYNLLHTLNIPNNFLWDKMSNTTQFISDYLIQIGRGTE |
| | | TEKTITTKKGKEKILTIRDVNWFNTFKPKISEETGKARTEIKR |
| | | DLQKNSDQFQKLAKSREQSCRTWVNNVTEEAKIKSGCPLIIF |
| | | VIEALVKDNRVFSGKGHRAIGWHNFGKQKNERRWWVQAIH |
| | | KAFQEQGVNHGYPVILCPPQYTSQTCPKCNHVDRDNRSGEK |
| | | FKCLKYGWIGNADLDVGAYNIARVAITGKALSKPLEQKKIK |
| | | KAKNKT |
| CasΦ.49 | 105 | MIKPTVSQFLTPGFKLIRNHSRTAGLKLKNEGEEACKKFVRE |
| | | NEIPKDECPNFQGGPAIANIIAKSREFTEWEIYQSSLAIQEVIFT |
| | | LPKDKLPEPILKEEWRAQWLSEHGLDTVPYKEAAGLNLIIKN |
| | | AVNTYKGVQVKVDNKNKNNLAKINRKNEIAKLNGEQEISFE |
| | | EIKAFDDKGYLLQKPSPNKSIYCYQSVSPKPFITSKYHNVNLP |
| | | EEYIGYYRKSNEPIVSPYQFDRLRIPIGEPGYVPKWQYTFLSK |
| | | KENKRRKLSKRIKNVSPILGIICIKKDWCVFDMRGLLRTNHW |
| | | KKYHKPTDSINDLFDYFTGDPVIDTKANVVRFRYKMENGIV |
| | | NYKPVREKKGKELLENICDQNGSCKLATVDVGQNNPVAIGL |
| | | FELKKVNGELTKTLISRHPTPIDFCNKITAYRERYDKLESSIKL |
| | | DAIKQLTSEQKIEVDNYNNNFTPQNTKQIVCSKLNINPNDLP |
| | | WDKMISGTHFISEKAQVSNKSEIYFTSTDKGKTKDVMKSDY |
| | | KWFQDYKPKLSKEVRDALSDIEWRLRRESLEFNKLSKSREQ |
| | | DARQLANWISSMCDVIGIENLVKKNNFFGGSGKREPGWDNF |
| | | YKPKKENRWWINAIHKALTELSQNKGKRVILLPAMRTSITCP |
| | | KCKYCDSKNRNGEKFNCLKCGIELNADIDVATENLATVAITA |
| | | QSMPKPTCERSGDAKKPVRARKAKAPEFHDKLAPSYTVVLR |
| | | EAVKRPAATKKAGQAKKKKEF |
| | | (Underlined sequence is Nuclear Localization |
| | | Signal; SEQ ID NO: 106) |
| CasΦ.12 | 107 | SNAPKKKRKVGIHGVPAAMIKPTVSQFLTPGFKLIRNHSRT |
| with NLS | | AGLKLKNEGEEACKKFVRENEIPKDECPNFQGGPAIANIIAKS |
| Signals | | REFTEWEIYQSSLAIQEVIFTLPKDKLPEPILKEEWRAQWLSE |
| | | HGLDTVPYKEAAGLNLIIKNAVNTYKGVQVKVDNKNKNNL |
| | | AKINRKNEIAKLNGEQEISFEEIKAFDDKGYLLQKPSPNKSIY |
| | | CYQSVSPKPFITSKYHNVNLPEEYIGYYRKSNEPIVSPYQFDR |
| | | LRIPIGEPGYVPKWQYTFLSKKENKRRKLSKRIKNVSPILGIICI |
| | | KKDWCVFDMRGLLRTNHWKKYHKPTDSINDLFDYFTGDPVI |
| | | DTKANVVRFRYKMENGIVNYKPVREKKGKELLENICDQNGS |
| | | CKLATVDVGQNNPVAIGLFELKKVNGELTKTLISRHPTPIDFC |
| | | NKITAYRERYDKLESSIKLDAIKQLTSEQKIEVDNYNNNFTPQ |
| | | NTKQIVCSKLNINPNDLPWDKMISGTHFISEKAQVSNKSEIYF |
| | | TSTDKGKTKDVMKSDYKWFQDYKPKLSKEVRDALSDIEWR |
| | | LRRESLEFNKLSKSREQDARQLANWISSMCDVIGIENLVKKN |
| | | NFFGGSGKREPGWDNFYKPKKENRWWINAIHKALTELSQNK |
| | | GKRVILLPAMRTSITCPKCKYCDSKNRNGEKFNCLKCGIELN |
| | | ADIDVATENLATVAITAQSMPKPTCERSGDAKKPVRARKAK |
| | | APEFHDKLAPSYTVVLREAVKRPAATKKAGQAKKKKEF |
| | | (Underlined sequences Nuclear Localization |
| | | Signals; SEQ ID NO: 112 and 106) |

[0144] In some embodiments, any of the programmable CasΦ nucleases of the present disclosure (e.g., any one of SEQ ID NO: 1 to 47, 105, or 107, or fragments or variants thereof) may include a nuclear localization signal (NLS). In some cases, one or more NLS are fused or linked to the N-terminus of the programmable CasΦ nuclease. In some embodiments, one or more NLS are fused or linked to the C-terminus of the programmable CasΦ nuclease. In some embodiments, one or more NLS are fused or linked to the N-terminus and the C-terminus of the programmable CasΦ nuclease. In some embodiments, the link between the NLS and the programmable CasΦ nuclease comprises a tag. In some cases, said NLS may have a sequence of KRPAATKKAGQAKKKKEF (SEQ ID NO: 106). The NLS can be selected to match the cell type of interest, for example several NLSs are known to be functional in different types of eukaryotic cell e.g. in mammalian cells. Suitable NLSs include the SV40 large T antigen NLS (PKKKRKV, SEQ ID NO: 110) and the c-Myc NLS (PAAKRVKLD, SEQ ID NO: 111). In some embodiments, an NLS may be the SV40 large T antigen NLS or the c-Myc NLS. NLSs that are functional in plant cells are described in Chang et al., (Plant Signal Behay. 2013 October; 8(10):e25976). In some embodiments, an NLS sequence can be selected from the following consensus sequences: KR(K/R)R, K(K/R)RK; (P/R)XXKR(\hat{ }DE)(K/R); KRX(W/F/Y)XXAF (SEQ ID NO: 2489); (R/P)XXKR(K/R)(\hat{ }DE); LGKR(K/R)(W/F/Y) (SEQ ID NO: 2490); KRX10-12K(KR)(KR) or KRX10-12K(KR)X(K/R).

[0145] In some embodiments, the nucleoplasmin NLS (KRPAATKKAGQAKKKKEF (SEQ ID NO: 106)) is linked or fused to the C-terminus of the programmable CasΦ nuclease. In some embodiments, the SV40 NLS (PKKKRKVGIHGVPAA) (SEQ ID NO: 112) is linked or fused to the N-terminus of the programmable CasΦ nuclease. In preferred embodiments, the nucleoplasmin NLS (SEQ ID NO: 106) is linked or fused to the C-terminus of the programmable CasΦ nuclease and the SV40 NLS (SEQ ID NO: 112) is linked or fused to the N-terminus of the programmable CasΦ nuclease.

[0146] In some embodiments, the CasΦ nuclease comprises more than 200 amino acids, more than 300 amino acids, more than 400 amino acids. In some embodiments, the CasΦ nuclease comprises less than 1500 amino acids, less than 1000 amino acids or less than 900 amino acids. In some embodiments, the CasΦ nuclease comprises between 200 and 1500 amino acids, between 300 and 1000 amino acids, or between 400 and 900 amino acids. In preferred embodiments, the CasΦ nuclease comprises between 400 and 900 amino acids.

[0147] “Percent identity” and “% identity” can refer to the extent to which two sequences (nucleotide or amino acid) have the same residue at the same positions in an alignment. For example, “an amino acid sequence is X % identical to SEQ ID NO: Y” can refer to % identity of the amino acid sequence to SEQ ID NO: Y and is elaborated as X % of residues in the amino acid sequence are identical to the residues of sequence disclosed in SEQ ID NO: Y. Generally, computer programs can be employed for such calculations. Illustrative programs that compare and align pairs of sequences, include ALIGN (Myers and Miller, Comput Appl Biosci. 1988 March; 4(1):11-7), FASTA (Pearson and Lipman, Proc Natl Acad Sci USA. 1988 April; 85(8):2444-8; Pearson, Methods Enzymol. 1990; 183:63-98) and gapped BLAST (Altschul et al., Nucleic Acids Res. 1997 Sep. 1; 25(17):3389-40), BLASTP, BLASTN, or GCG (Devereux et al., Nucleic Acids Res. 1984 Jan. 11; 12(1 Pt 1):387-95).

[0148] A CasΦ polypeptide or a variant thereof can comprise at least 70%, at least 75%, at least 80%, at least 85%, at least 90%, at least 92%, at least 95%, at least 97%, at least 98%, at least 99%, or 100% sequence identity with any one of SEQ ID NO: 1 to SEQ ID NO: 47, SEQ ID NO. 105, and SEQ ID NO: 107.

[0149] A programmable nuclease or nickase of the present disclosure can comprise at least 70%, at least 75%, at least 80%, at least 85%, at least 90%, at least 92%, at least 95%, at least 97%, at least 98%, at least 99%, or 100% sequence identity with any one of SEQ ID NO: 1 to SEQ ID NO: 47, SEQ ID NO. 105, and SEQ ID NO: 107.

[0150] Compositions and methods of the disclosure can comprise a programmable nuclease comprising at least 70%, at least 75%, at least 80%, at least 85%, at least 90%, at least 92%, at least 95%, at least 97%, at least 98%, at least 99%, or 100% sequence identity to SEQ ID NO: 2.

[0151] Compositions and methods of the disclosure can comprise a programmable nuclease comprising at least 70%, at least 75%, at least 80%, at least 85%, at least 90%, at least 92%, at least 95%, at least 97%, at least 98%, at least 99%, or 100% sequence identity to SEQ ID NO: 4.

[0152] Compositions and methods of the disclosure can comprise a programmable nuclease comprising at least 70%, at least 75%, at least 80%, at least 85%, at least 90%, at least 92%, at least 95%, at least 97%, at least 98%, at least 99%, or 100% sequence identity to SEQ ID NO: 11.

[0153] Compositions and methods of the disclosure can comprise a programmable nuclease comprising at least 70%, at least 75%, at least 80%, at least 85%, at least 90%, at least 92%, at least 95%, at least 97%, at least 98%, at least 99%, or 100% sequence identity to SEQ ID NO: 17.

[0154] Compositions and methods of the disclosure can comprise a programmable nuclease comprising at least 70%, at least 75%, at least 80%, at least 85%, at least 90%, at least 92%, at least 95%, at least 97%, at least 98%, at least 99%, or 100% sequence identity to SEQ ID NO: 18.

[0155] Compositions and methods of the disclosure can comprise a programmable polypeptide or nuclease comprising at least 70%, at least 75%, at least 80%, at least 85%, at least 90%, at least 92%, at least 95%, at least 97%, at least 98%, at least 99%, or 100% sequence identity to SEQ ID NO: 12.

[0156] Compositions and methods of the disclosure can comprise a programmable polypeptide or nuclease comprising at least 70%, at least 75%, at least 80%, at least 85%, at least 90%, at least 92%, at least 95%, at least 97%, at least 98%, at least 99%, or 100% sequence identity to SEQ ID NO: 105.

[0157] Compositions and methods of the disclosure can comprise a programmable polypeptide or nuclease comprising at least 70%, at least 75%, at least 80%, at least 85%, at least 90%, at least 92%, at least 95%, at least 97%, at least 98%, at least 99%, or 100% sequence identity to SEQ ID NO: 107.

[0158] In some embodiments, the programmable nuclease comprises a sequence with at least 70% identity to SEQ ID NO: 2. In some embodiments, the programmable nuclease comprises a sequence with at least 75% identity to SEQ ID NO: 2. In some embodiments, the programmable nuclease comprises a sequence with at least 80% identity to SEQ ID NO: 2. In some embodiments, the programmable nuclease comprises a sequence with at least 85% identity to SEQ ID NO: 2. In some embodiments, the programmable nuclease comprises a sequence with at least 90% identity to SEQ ID NO: 2. In some embodiments, the programmable nuclease comprises a sequence with at least 92% identity to SEQ ID NO: 2. In some embodiments, the programmable nuclease comprises a sequence with at least 95% identity to SEQ ID NO: 2. In some embodiments, the programmable nuclease comprises a sequence with at least 97% identity to SEQ ID NO: 2. In some embodiments, the programmable nuclease comprises a sequence with at least 98% identity to SEQ ID NO: 2. In some embodiments, the programmable nuclease comprises a sequence with at least 99% identity to SEQ ID NO: 2. In some embodiments, the programmable nuclease comprises a sequence of SEQ ID NO: 2.

[0159] In some embodiments, the programmable nuclease comprises a sequence with at least 70% identity to SEQ ID NO: 4. In some embodiments, the programmable nuclease comprises a sequence with at least 75% identity to SEQ ID NO: 4. In some embodiments, the programmable nuclease comprises a sequence with at least 80% identity to SEQ ID NO: 4. In some embodiments, the programmable nuclease comprises a sequence with at least 85% identity to SEQ ID NO: 4. In some embodiments, the programmable nuclease comprises a sequence with at least 90% identity to SEQ ID NO: 4. In some embodiments, the programmable nuclease comprises a sequence with at least 92% identity to SEQ ID NO: 4. In some embodiments, the programmable nuclease comprises a sequence with at least 95% identity to SEQ ID NO: 4. In some embodiments, the programmable nuclease comprises a sequence with at least 97% identity to SEQ ID NO: 4. In some embodiments, the programmable nuclease comprises a sequence with at least 98% identity to SEQ ID NO: 4. In some embodiments, the programmable nuclease comprises a sequence with at least 99% identity to SEQ ID NO: 4. In some embodiments, the programmable nuclease comprises a sequence of SEQ ID NO: 4.

[0160] In some embodiments, the programmable nuclease comprises a sequence with at least 70% identity to SEQ ID NO: 11. In some embodiments, the programmable nuclease comprises a sequence with at least 75% identity to SEQ ID NO: 11. In some embodiments, the programmable nuclease comprises a sequence with at least 80% identity to SEQ ID NO: 11. In some embodiments, the programmable nuclease comprises a sequence with at least 85% identity to SEQ ID NO: 11. In some embodiments, the programmable nuclease comprises a sequence with at least 90% identity to SEQ ID NO: 11. In some embodiments, the programmable nuclease comprises a sequence with at least 92% identity to SEQ ID NO: 11. In some embodiments, the programmable nuclease comprises a sequence with at least 95% identity to SEQ ID NO: 11. In some embodiments, the programmable nuclease comprises a sequence with at least 97% identity to SEQ ID NO: 11. In some embodiments, the programmable nuclease comprises a sequence with at least 98% identity to SEQ ID NO: 11. In some embodiments, the programmable nuclease comprises a sequence with at least 99% identity to SEQ ID NO: 11. In some embodiments, the programmable nuclease comprises a sequence of SEQ ID NO: 11.

[0161] In some embodiments, the programmable nuclease comprises a sequence with at least 70% identity to SEQ ID NO: 12. In some embodiments, the programmable nuclease comprises a sequence with at least 75% identity to SEQ ID NO: 12. In some embodiments, the programmable nuclease comprises a sequence with at least 80% identity to SEQ ID NO: 12. In some embodiments, the programmable nuclease comprises a sequence with at least 85% identity to SEQ ID NO: 12. In some embodiments, the programmable nuclease comprises a sequence with at least 90% identity to SEQ ID NO: 12. In some embodiments, the programmable nuclease comprises a sequence with at least 92% identity to SEQ ID NO: 12. In some embodiments, the programmable nuclease comprises a sequence with at least 95% identity to SEQ ID NO: 12. In some embodiments, the programmable nuclease comprises a sequence with at least 97% identity to SEQ ID NO: 12. In some embodiments, the programmable nuclease comprises a sequence with at least 98% identity to SEQ ID NO: 12. In some embodiments, the programmable nuclease comprises a sequence with at least 99% identity to SEQ ID NO: 12. In some embodiments, the programmable nuclease comprises a sequence of SEQ ID NO: 12.

[0162] In some embodiments, the programmable nuclease comprises a sequence with at least 70% identity to SEQ ID NO: 17. In some embodiments, the programmable nuclease comprises a sequence with at least 75% identity to SEQ ID NO: 17. In some embodiments, the programmable nuclease comprises a sequence with at least 80% identity to SEQ ID NO: 17. In some embodiments, the programmable nuclease comprises a sequence with at least 85% identity to SEQ ID NO: 17. In some embodiments, the programmable nuclease comprises a sequence with at least 90% identity to SEQ ID NO: 17. In some embodiments, the programmable nuclease comprises a sequence with at least 92% identity to SEQ ID NO: 17. In some embodiments, the programmable nuclease comprises a sequence with at least 95% identity to SEQ ID NO: 17. In some embodiments, the programmable nuclease comprises a sequence with at least 97% identity to SEQ ID NO: 17. In some embodiments, the programmable nuclease comprises a sequence with at least 98% identity to SEQ ID NO: 17. In some embodiments, the programmable nuclease comprises a sequence with at least 99% identity to SEQ ID NO: 17. In some embodiments, the programmable nuclease comprises a sequence of SEQ ID NO: 17.

[0163] In some embodiments, the programmable nuclease comprises a sequence with at least 70% identity to SEQ ID NO: 18. In some embodiments, the programmable nuclease comprises a sequence with at least 75% identity to SEQ ID NO: 18. In some embodiments, the programmable nuclease comprises a sequence with at least 80% identity to SEQ ID NO: 18. In some embodiments, the programmable nuclease comprises a sequence with at least 85% identity to SEQ ID NO: 18. In some embodiments, the programmable nuclease comprises a sequence with at least 90% identity to SEQ ID NO: 18. In some embodiments, the programmable nuclease comprises a sequence with at least 92% identity to SEQ ID NO: 18. In some embodiments, the programmable nuclease comprises a sequence with at least 95% identity to SEQ ID NO: 18. In some embodiments, the programmable nuclease comprises a sequence with at least 97% identity to SEQ ID NO: 18. In some embodiments, the programmable nuclease comprises a sequence with at least 98% identity to SEQ ID NO: 18. In some embodiments, the programmable nuclease comprises a sequence with at least 99% identity to SEQ ID NO: 18. In some embodiments, the programmable nuclease comprises a sequence of SEQ ID NO: 18.

[0164] In some embodiments, the programmable nuclease comprises a sequence with at least 70% identity to SEQ ID NO: 105. In some embodiments, the programmable nuclease comprises a sequence with at least 75% identity to SEQ ID NO: 105. In some embodiments, the programmable nuclease comprises a sequence with at least 80% identity to SEQ ID NO: 105. In some embodiments, the programmable nuclease comprises a sequence with at least 85% identity to SEQ ID NO: 105. In some embodiments, the programmable nuclease comprises a sequence with at least 90% identity to SEQ ID NO: 105. In some embodiments, the programmable nuclease comprises a sequence with at least 92% identity to SEQ ID NO: 105. In some embodiments, the programmable nuclease comprises a sequence with at least 95% identity to SEQ ID NO: 105. In some embodiments, the programmable nuclease comprises a sequence with at least 97% identity to SEQ ID NO: 105. In some embodiments, the programmable nuclease comprises a sequence with at least 98% identity to SEQ ID NO: 105. In some embodiments, the programmable nuclease comprises a sequence with at least 99% identity to SEQ ID NO: 105. In some embodiments, the programmable nuclease comprises a sequence of SEQ ID NO: 105.

[0165] In some embodiments, the programmable nuclease comprises a sequence with at least 70% identity to the N-terminal 717 amino acid residues of SEQ ID NO: 105. In some embodiments, the programmable nuclease comprises a sequence with at least 75% identity to the N-terminal 717 amino acid residues of SEQ ID NO: 105. In some embodiments, the programmable nuclease comprises a sequence with at least 80% identity to the N-terminal 717 amino acid residues of SEQ ID NO: 105. In some embodiments, the programmable nuclease comprises a sequence with at least 85% identity to the N-terminal 717 amino acid residues of SEQ ID NO: 105. In some embodiments, the programmable nuclease comprises a sequence with at least 90% identity to SEQ ID NO: 105. In some embodiments, the programmable nuclease comprises a sequence with at least 95% identity to the N-terminal 717 amino acid residues of SEQ ID NO: 105. In some embodiments, the programmable nuclease comprises a sequence with at least 98% identity to the N-terminal 717 amino acid residues of SEQ ID NO: 105. In some embodiments, the programmable nuclease comprises a sequence with at least 99% identity to the N-terminal 717 amino acid residues of SEQ ID NO: 105. In some embodiments, the programmable nuclease comprises a sequence of the N-terminal 717 amino acid residues of SEQ ID NO: 105.

[0166] In some embodiments, the programmable nuclease comprises a sequence with at least 70% identity to SEQ ID NO: 106. In some embodiments, the programmable nuclease comprises a sequence with 75% identity to SEQ ID NO: 106. In some embodiments, the programmable nuclease comprises a sequence with at least 80% identity to SEQ ID NO: 106. In some embodiments, the programmable nuclease comprises a sequence with at least 85% identity to SEQ ID NO: 106. In some embodiments, the programmable nuclease comprises a sequence with at least 90% identity to SEQ ID NO: 105. In some embodiments, the programmable nuclease comprises a sequence with at least 95% identity to SEQ ID NO: 106. In some embodiments, the programmable nuclease comprises a sequence with at least 98% identity to SEQ ID NO: 106. In some embodiments, the programmable nuclease comprises a sequence with at least 99% identity to SEQ ID NO: 106. In some embodiments, the programmable nuclease comprises a sequence of SEQ ID NO: 106.

[0167] In some embodiments, the programmable nuclease comprises a sequence with at least 70% identity to SEQ ID NO: 107. In some embodiments, the programmable nuclease comprises a sequence with at least 75% identity to SEQ ID NO: 107. In some embodiments, the programmable nuclease comprises a sequence with at least 80% identity to SEQ ID NO: 107. In some embodiments, the programmable nuclease comprises a sequence with at least 85% identity to SEQ ID NO: 107. In some embodiments, the programmable nuclease comprises a sequence with at least 90% identity to SEQ ID NO: 107. In some embodiments, the programmable nuclease comprises a sequence with at least 95% identity to SEQ ID NO: 107. In some embodiments, the programmable nuclease comprises a sequence with at least 98% identity to SEQ ID NO: 107. In some embodiments, the programmable nuclease comprises a sequence with at least 99% identity to SEQ ID NO: 107. In some embodiments, the programmable nuclease comprises a sequence of SEQ ID NO: 107.

[0168] The programmable nucleases disclosed herein can be codon optimized for expression in a specific cell, for example, a bacterial cell, a plant cell, a eukaryotic cell, an animal cell, a mammalian cell, or a human cell. In some embodiments, the programmable nuclease is codon optimized for a human cell.

[0169] The programmable nucleases presented in TABLE 1 or variants or fragments thereof comprising at least 70%, at least 75%, at least 80%, at least 85%, at least 90%, at least 92%, at least 95%, at least 97%, at least 99%, or 100% sequence identity with any one of SEQ ID NO: 1-SEQ ID NO: 47, SEQ ID NO. 105, and SEQ ID NO: 107 can comprise nicking activity. Compositions and methods of the disclosure can comprise a programmable nickase comprising at least 70%, at least 75%, at least 80%, at least 85%, at least 90%, at least 92%, at least 95%, at least 97%, at least 99%, or 100% sequence identity to any one of SEQ ID NO: 1-SEQ ID NO: 47, SEQ ID NO. 105, and SEQ ID NO: 107. Compositions and methods of the disclosure can comprise a programmable nickase comprising at least 70%, at least 75%, at least 80%, at least 85%, at least 90%, at least 92%, at least 95%, at least 97%, at least 99%, or 100% sequence identity to SEQ ID NO: 2. Compositions and methods of the disclosure can comprise a programmable nickase comprising at least 70%, at least 75%, at least 80%, at least 85%, at least 90%, at least 92%, at least 95%, at least 97%, at least 99%, or 100% sequence identity to SEQ ID NO: 4. Compositions and methods of the disclosure can comprise a programmable nickase comprising at least 70%, at least 75%, at least 80%, at least 85%, at least 90%, at least 92%, at least 95%, at least 97%, at least 99%, or 100% sequence identity to SEQ ID NO: 11. Compositions and methods of the disclosure can comprise a programmable nickase comprising at least 70%, at least 75%, at least 80%, at least 85%, at least 90%, at least 92%, at least 95%, at least 97%, at least 99%, or 100% sequence identity to SEQ ID NO: 17. Compositions and methods of the disclosure can comprise a programmable nuclease comprising at least 70%, at least 75%, at least 80%, at least 85%, at least 90%, at least 92%, at least 95%, at least 97%, at least 99%, or 100% sequence identity to SEQ ID NO: 18.

[0170] The programmable nucleases presented in TABLE 1 or variants thereof comprising at least 70%, at least 75%, at least 80%, at least 85%, at least 90%, at least 92%, at least 95%, at least 97%, at least 99%, or 100% sequence identity with any one of SEQ ID NO: 1-SEQ ID NO: 47, SEQ ID NO. 105, and SEQ ID NO: 107 can comprise double-strand DNA cleavage activity. Compositions and methods of the disclosure can comprise a programmable nuclease capable of introducing a double-strand break in a target DNA sequence and comprising at least 70%, at least 75%, at least 80%, at least 85%, at least 90%, at least 92%, at least 95%, at least 97%, at least 99%, or 100% sequence identity to any one of SEQ ID NO: 1-SEQ ID NO: 47, SEQ ID NO. 105, and SEQ ID NO: 107. Compositions and methods of the disclosure can comprise a programmable nuclease with double-strand DNA cleaving activity and comprising at least 70%, at least 75%, at least 80%, at least 85%, at least 90%, at least 92%, at least 95%, at least 97%, at least 99%, or 100% sequence identity to SEQ ID NO: 12. Compositions and methods of the disclosure can comprise a programmable nuclease with double-strand DNA cleaving activity and comprising at least 70%, at least 75%, at least 80%, at least 85%, at least 90%, at least 92%, at least 95%, at least 97%, at least 99%, or 100% sequence identity to SEQ ID NO: 2. Compositions and methods of the disclosure can comprise a programmable nickase comprising at least 70%, at least 75%, at least 80%, at least 85%, at least 90%, at least 92%, at least 95%, at least 97%, at least 99%, or 100% sequence identity to SEQ ID NO: 4. Compositions and methods of the disclosure can comprise a programmable nuclease with double-strand DNA cleaving activity and comprising at least 70%, at least 75%, at least 80%, at least 85%, at least 90%, at least 92%, at least 95%, at least 97%, at least 99%, or 100% sequence identity to SEQ ID NO: 11.

[0171] The programmable nucleases presented in TABLE 1 or variants thereof comprising at least 70%, at least 75%, at least 80%, at least 85%, at least 90%, at least 92%, at least 95%, at least 97%, at least 99%, or 100% sequence identity with any one of SEQ ID NO: 1-SEQ ID NO: 47 and SEQ ID NO. 105 can comprise nickase activity and double-strand DNA cleavage activity. The ratio of the nickase activity and double-strand DNA cleavage activity can be modulated depending on the reaction conditions including for example, RNP complexing temperature, the crRNA repeat sequence in the guide nucleic acid. In some embodiments, nickase activity is reduced when RNP complexing temperature is room temperature, for example 20 to 22° C., compared to when RNP complexing temperature is 37° C. In some embodiments, the double-strand DNA cleavage activity is insensitive to RNP complexing at 37° C. compared to room temperature, or the double-strand DNA cleavage activity is reduced by 10%, 20% or 30% when complexed with a guide RNA at room temperature as compared to when complexed at 37° C. In a preferred embodiment, double-strand cleavage activity is similar when the RNP complexing temperature is room temperature and 37° C.

[0172] The programmable nucleases presented in TABLE 1 or variants thereof comprising at least 70%, at least 75%, at least 80%, at least 85%, at least 90%, at least 92%, at least 95%, at least 97%, at least 99%, or 100% sequence identity with any one of SEQ ID NO: 1-SEQ ID NO: 47, SEQ ID NO. 105, and SEQ ID NO: 107 can comprise reduced or substantially no nucleic acid cleavage activity.

[0173] In some embodiments, the N-terminal amino acid sequence of the programmable nuclease is not MISKMIKPTV (SEQ ID NO: 113). In some embodiments, the programmable nuclease does not include the amino acid sequence MISKMIKPTV (SEQ ID NO: 114).

[0174] In some embodiments, the N-terminal amino acid sequence of the programmable nuclease is not MISK (SEQ ID NO: 115). In some embodiments, the programmable nuclease does not include the amino acid sequence MISK (SEQ ID NO: 115).

[0175] In some embodiments, a composition comprises a first programmable nuclease described herein and a second programmable nuclease described herein. In some embodiments, a complex comprises a first programmable nuclease described herein and a second programmable nuclease described herein. In preferred embodiments, a complex comprises a first programmable nuclease described herein and a second programmable nuclease described herein, wherein the first and second programmable nucleases are the same programmable nuclease. In some embodiments, the first and second programmable nucleases form a dimer. In some preferred embodiments, the first and second programmable nucleases form a homodimer.

[0176] In some embodiments, a dimer comprises a first programmable nuclease described herein and a second programmable nuclease described herein. In preferred embodiments, the dimer is a homodimer wherein the first and second programmable nucleases are the same.

[0177] In some embodiments, a programmable nuclease may be a programmable nickase. The present disclosure provides compositions of programmable nickases, capable of introducing a break in a single strand of a double stranded DNA (dsDNA) (“nicking”). In some embodiments the programmable nickase is a programmable DNA nickase. Said programmable nickases can be coupled to a guide nucleic acid that targets a particular region of interest in the dsDNA. In some embodiments, two programmable nickases are combined and delivered together to generate two strand breaks. For example, a first programmable nickase can be targeted to and nicks a first region of dsDNA and a second programmable nickase can be targeted to and nicks a second region of the same dsDNA on the opposing strand. When combined and delivered together to generate nicks on opposing strands of the dsDNA, two strand breaks in the dsDNA can be generated. The strand breaks can be repaired and rejoined by non-homologous end joining (NHEJ) or homology directed repair (HDR). Thus, two programmable nickases disclosed herein can be combined to selectively edit nucleic acid sequences. This can be useful in any genome editing method, for example, used for therapeutic applications to treat a disease or disorder, or for agricultural applications.

[0178] In some embodiments, a programmable nuclease as disclosed herein can be used for genome editing purposes to generate strand breaks in order to excise a region of DNA or to subsequently introduce a region of DNA (e.g., donor DNA).

[0179] In some embodiments, the programmable nucleases (e.g., nickases) disclosed herein can be used in DNA Endonuclease Targeted CRISPR TransReporter (DETECTR) assays. In some embodiments, the programmable nuclease is a programmable nickase. A DETECTR assay can utilize the trans-cleavage abilities of some programmable nucleases to achieve fast and high-fidelity detection of a target nucleic acid in a sample. The target nucleic acid can be DNA or RNA. For example, following target DNA extraction from a biological sample, crRNA comprising a portion that is complementary to the target DNA of interest can bind to the target DNA sequence, initiating indiscriminate ssDNase activity by the programmable nuclease. In some embodiments, the extracted DNA is amplified by PCR or isothermal amplification reactions before contacting the DNA to the programmable nuclease complexed with a guide RNA. Upon hybridization with the target DNA, the trans-cleavage activity of the programmable nuclease is activated, which can then cleave an ssDNA fluorescence-quenching (FQ) reporter molecule. Cleavage of the reporter molecule can provide a fluorescent readout indicating the presence of the target DNA in the sample. In some embodiments, the programmable nucleases disclosed herein can be combined, or multiplexed, with other programmable nucleases in a DETECTR assay. The principles of the DETECTR assay are described in Chen et al. (Science 2018 Apr. 27; 360(6387):436-439) and can be modified to facilitate the use of the programmable nucleases described herein. In some embodiments, the programmable nucleases disclosed herein can be used in a specific high-sensitivity enzymatic reporter unlocking (SHERLOCK) assay. The principles of the SHERLOCK assay are described in Kellner et al. (Nat Protoc. 2019 October; 14(10):2986-3012) and can be modified to facilitate the use of the programmable nucleases described herein. Thus some embodiments provide a method of detecting a target nucleic acid in a sample, the method comprising: contacting a sample comprising a target nucleic acid with (a) a programmable CasΦ nuclease disclosed herein, (b) a guide RNA comprising a region that binds to the programmable CasΦ nuclease and an additional region that binds to the target nucleic acid, and (c) a detector nucleic acid that does not bind the guide RNA; cleaving the detector nucleic acid by the programmable CasΦ nuclease; and detecting the target nucleic acid by measuring a signal produced by the cleavage of the detector nucleic acid. In preferred embodiments, the detector nucleic acid is a single stranded DNA reporter.

[0180] The programmable nucleases of the present disclosure can show enhanced activity, as measured by enhanced cleavage of an ssDNA-FQ reporter, under certain conditions in the presence of the target DNA. For example, the programmable nucleases of the present disclosure can have variable levels of activity based on a buffer formulation, a pH level, temperature, or salt. Buffers consistent with the present disclosure include phosphate buffers, Tris buffers, and HEPES buffers. Programmable nucleases of the present disclosure can show optimal activity in phosphate buffers, Tris buffers, and HEPES buffers.

[0181] Programmable nucleases can also exhibit varying levels of nickase or double-stranded cleavage activity at different pH levels. For example, enhanced cleavage can be observed between pH 7 and pH 9. In some embodiments, programmable nuclease of the present disclosure exhibit enhanced cleavage at about pH 7, about pH 7.1, about pH 7.2, about pH 7.3, about pH 7.4, about pH 7.5, about pH 7.6, about pH 7.7, about pH 7.8, about pH 7.9, about pH 8, about pH 8.1, about pH 8.2, about pH 8.3, about pH 8.4, about pH 8.5, about pH 8.6, about pH 8.7, about pH 8.8, about pH 8.9, about pH 9, from pH 7 to 7.5, from pH 7.5 to 8, from pH 8 to 8.5, from pH 8.5 to 9, or from pH 7 to 8.5.

[0182] In some embodiments, the programmable nucleases of the present disclosure exhibit enhanced cleavage of ssDNA-FQ reporters DNA at a temperature of 25° C. to 50° C. in the presence of target DNA. For example, the programmable nucleases of the present disclosure can exhibit enhanced cleavage of an ssDNA-FQ reporter at about 25° C., about 26° C., about 27° C., about 28° C., about 29° C., about 30° C., about 31° C., about 32° C., about 33° C., about 34° C., about 35° C., about 36° C., about 37° C., about 38° C., about 39° C., about 40° C., about 41° C., about 42° C., about 43° C., about 44° C., about 45° C., about 46° C., about 47° C., about 48° C., about 49° C., about 50° C., from 30° C. to 40° C., from 35° C. to 45° C., or from 35° C. to 40° C.

[0183] The programmable nucleases of the present disclosure may not be sensitive to salt concentrations in a sample in the presence of the target DNA. Advantageously, said programmable nucleases can be active and capable of cleaving ssDNA-FQ-reporter sequences under varying salt concentrations from 25 nM salt to 200 mM salt. Various salts are consistent with this property of the programmable nucleases disclosed herein, including NaCl or KCl. The programmable nucleases of the present disclosure can be active at salt concentrations of from 25 nM to 500 nM salt, from 500 nM to 1000 nM salt, from 1000 nM to 2000 nM salt, from 2000 nM to 3000 nM salt, from 3000 nM to 4000 nM salt, from 4000 nM to 5000 nM salt, from 5000 nM to 6000 nM salt, from 6000 nM to 7000 nM salt, from 7000 nM to 8000 nM salt, from 8000 nM to 9000 nM salt, from 9000 nM to 0.01 mM salt, from 0.01 mM to 0.05 mM salt, from 0.05 mM to 0.1 mM salt, from 0.1 mM to 10 mM salt, from 10 mM to 100 mM salt, or from 100 mM to 500 mM salt. Thus, the programmable nucleases of the present disclosure can exhibit cleavage activity independent of the salt concentration in a sample.

[0184] Programmable nucleases of the present disclosure can be capable of cleaving any ssDNA-FQ reporter, regardless of its sequence. The programmable nucleases provided herein can, thus, be capable of cleaving a universal ssDNA FQ reporter. In some embodiments, the programmable nucleases provided herein cleave homopolymer ssDNA-FQ reporter comprising 5 to 20 adenines, 5 to 20 thymines, 5 to 20 cytosines, or 5 to 20 guanines. Programmable nucleases of the present disclosure, thus, are capable of cleaving ssDNA-FQ reporters also cleaved by programmable nucleases, as disclosed elsewhere herein, allowing for facile multiplexing of multiple programmable nickases and programmable nucleases in a single assay having a single ssDNA-FQ reporter.

[0185] Programmable nucleases of the present disclosure can bind a wild type protospacer adjacent motif (PAM) or a mutant PAM in a target DNA. In some embodiments the programmable CasΦ nucleases of the present disclosure recognizes and bind a protospacer adjacent motif (PAM) of 5′-TBN-3′, where B is one or more of C, G, or, T. For example, programmable CasΦ nucleases of the present disclosure may recognizes and bind a protospacer adjacent motif (PAM) of 5′-TTTN-3′. As another example, programmable CasΦ nucleases of the present disclosure may recognizes and bind a protospacer adjacent motif (PAM) of 5′-TTN-3.′ In some embodiments, the PAM is 5′-TTTA-3′, 5′-GTTK-3′, 5′-VTTK-3′, 5′-VTTS-3′, 5′-TTTS-3′ or 5′-VTTN-3′, where K is G or T, V is A, C or G, and S is C or G. In some embodiments, the PAM is 5′-GTTB-3′, wherein B is C, G, or, T.

[0186] In some embodiments of the present disclosure, the programmable CasΦ nucleases recognize and bind a PAM of 5′-NTTN-3′.

[0187] In some embodiments, when the programmable CasΦ nuclease or a variant thereof comprises at least 70%, at least 75%, at least 80%, at least 85%, at least 90%, at least 92%, at least 95%, at least 97%, at least 99%, or 100% sequence identity with SEQ ID NO: 2, the programmable CasΦ nuclease or a variant recognizes a 5′-GTTK-3′ PAM. In some embodiments, when the programmable CasΦ nuclease or a variant thereof comprises at least 70%, at least 75%, at least 80%, at least 85%, at least 90%, at least 92%, at least 95%, at least 97%, at least 99%, or 100% sequence identity with SEQ ID NO: 2, the programmable CasΦ nuclease or a variant recognizes a 5′-NTTN-3′ PAM.

[0188] In some embodiments, when the programmable CasΦ nuclease or a variant thereof comprises at least 70%, at least 75%, at least 80%, at least 85%, at least 90%, at least 92%, at least 95%, at least 97%, at least 99%, or 100% sequence identity with SEQ ID NO: 4, the programmable CasΦ nuclease or a variant recognizes a 5′-VTTK-3′ PAM. In some embodiments, when the programmable CasΦ nuclease or a variant thereof comprises at least 70%, at least 75%, at least 80%, at least 85%, at least 90%, at least 92%, at least 95%, at least 97%, at least 99%, or 100% sequence identity with SEQ ID NO: 4, the programmable CasΦ nuclease or a variant recognizes a 5′-NTTN-3′ PAM.

[0189] In some embodiments, when the programmable CasΦ nuclease or a variant thereof comprises at least 70%, at least 75%, at least 80%, at least 85%, at least 90%, at least 92%, at least 95%, at least 97%, at least 99%, or 100% sequence identity with SEQ ID NO: 11, the programmable CasΦ nuclease or a variant recognizes a 5′-VTTS-3′ PAM. In some embodiments, when the programmable CasΦ nuclease or a variant thereof comprises at least 70%, at least 75%, at least 80%, at least 85%, at least 90%, at least 92%, at least 95%, at least 97%, at least 99%, or 100% sequence identity with SEQ ID NO: 11, the programmable CasΦ nuclease or a variant recognizes a 5′-NTTN-3′ PAM.

[0190] In some embodiments, when the programmable CasΦ nuclease or a variant thereof comprises at least 70%, at least 75%, at least 80%, at least 85%, at least 90%, at least 92%, at least 95%, at least 97%, at least 99%, or 100% sequence identity with SEQ ID NO: 12, the programmable CasΦ nuclease or a variant recognizes a 5′-TTTS-3′ PAM. In some embodiments, when the programmable CasΦ nuclease or a variant thereof comprises at least 70%, at least 75%, at least 80%, at least 85%, at least 90%, at least 92%, at least 95%, at least 97%, at least 99%, or 100% sequence identity with SEQ ID NO: 12, the programmable CasΦ nuclease or a variant recognizes a 5′-NTTN-3′ PAM.

[0191] In some embodiments, when the programmable CasΦ nuclease or a variant thereof comprises at least 70%, at least 75%, at least 80%, at least 85%, at least 90%, at least 92%, at least 95%, at least 97%, at least 99%, or 100% sequence identity with SEQ ID NO: 18, the programmable CasΦ nuclease or a variant recognizes a 5′-VTTN-3′ PAM.

[0192] In some embodiments, when the programmable CasΦ nuclease or a variant thereof comprises at least 70%, at least 75%, at least 80%, at least 85%, at least 90%, at least 92%, at least 95%, at least 97%, at least 99%, or 100% sequence identity with SEQ ID NO: 20, the programmable CasΦ nuclease or a variant recognizes a 5′-NTNN-3′ PAM.

[0193] In some embodiments, when the programmable CasΦ nuclease or a variant thereof comprises at least 70%, at least 75%, at least 80%, at least 85%, at least 90%, at least 92%, at least 95%, at least 97%, at least 99%, or 100% sequence identity with SEQ ID NO: 20, the programmable CasΦ nuclease or a variant recognizes a 5′-TTN-3′ PAM.

[0194] In some embodiments, when the programmable CasΦ nuclease or a variant thereof comprises at least 70%, at least 75%, at least 80%, at least 85%, at least 90%, at least 92%, at least 95%, at least 97%, at least 99%, or 100% sequence identity with SEQ ID NO: 26, the programmable CasΦ nuclease or a variant recognizes a 5′-NTTG-3′ PAM.

[0195] In some embodiments, when the programmable CasΦ nuclease or a variant thereof comprises at least 70%, at least 75%, at least 80%, at least 85%, at least 90%, at least 92%, at least 95%, at least 97%, at least 99%, or 100% sequence identity with SEQ ID NO: 32, the programmable CasΦ nuclease or a variant recognizes a 5′-GTTB-3′ PAM, wherein B is C, G, or

[0196] N.

[0197] In some embodiments, when the programmable CasΦ nuclease or a variant thereof comprises at least 70%, at least 75%, at least 80%, at least 85%, at least 90%, at least 92%, at least 95%, at least 97%, at least 99%, or 100% sequence identity with SEQ ID NO: 42, the programmable CasΦ nuclease or a variant recognizes a 5′-GTTN-3′ PAM.

[0198] In some embodiments, when the programmable CasΦ nuclease or a variant thereof comprises at least 70%, at least 75%, at least 80%, at least 85%, at least 90%, at least 92%, at least 95%, at least 97%, at least 99%, or 100% sequence identity with SEQ ID NO: 41, the programmable CasΦ nuclease or a variant recognizes a 5′-NTTN-3′ PAM.

[0199] In some embodiments, when the programmable CasΦ nuclease or a variant thereof comprises at least 70%, at least 75%, at least 80%, at least 85%, at least 90%, at least 92%, at least 95%, at least 97%, at least 99%, or 100% sequence identity with SEQ ID NO: 24, the programmable CasΦ nuclease or a variant recognizes a 5′-NTNN-3′ PAM.

[0200] In some embodiments, when the programmable CasΦ nuclease or a variant thereof comprises at least 70%, at least 75%, at least 80%, at least 85%, at least 90%, at least 92%, at least 95%, at least 97%, at least 99%, or 100% sequence identity with SEQ ID NO: 25, the programmable CasΦ nuclease or a variant recognizes a 5′-NTNN-3′ PAM.

[0201] The programmable nucleases and other reagents (e.g., a guide nucleic acid) can be formulated in a buffer disclosed herein. A wide variety of buffered solutions are compatible with the methods, compositions, reagents, enzymes, and kits disclosed herein. Buffers are compatible with different programmable nucleases described herein. Any of the methods, compositions, reagents, enzymes, or kits disclosed herein may comprise a buffer. These buffers may be compatible with the other reagents, samples, and support mediums as described herein for detection of an ailment, such as a disease, cancer, or genetic disorder, or genetic information, such as for phenotyping, genotyping, or determining ancestry. A buffer, as described herein, can enhance the cis- or trans-cleavage rates of any of the programmable nucleases described herein. The buffer can increase the discrimination of the programmable nucleases for the target nucleic acid. The methods as described herein can be performed in the buffer.

[0202] In some embodiments, a buffer may comprise one or more of a buffering agent, a salt, a crowding agent, or a detergent, or any combination thereof. A buffer may comprise a reducing agent. A buffer may comprise a competitor. Exemplary buffering agents include HEPES, TRIS, MES, ADA, PIPES, ACES, MOPSO, BIS-TRIS propane, BES, MOPS, TES, DISO, Trizma, TRICINE, GLY-GLY, HEPPS, BICINE, TAPS, A MPD, A MPSO, CHES, CAPSO, AMP, CAPS, phosphate, citrate, acetate, imidazole, or any combination thereof. A buffering agent may be compatible with a programmable nuclease. A buffer compatible with a programmable nuclease may comprise a buffering agent at a concentration of from 1 mM to 200 mM. A buffer compatible with a programmable nuclease may comprise a buffering agent at a concentration of from 10 mM to 30 mM. A buffer compatible with a programmable nuclease may comprise a buffering agent at a concentration of about 20 mM. A composition (e.g., a composition comprising a programmable nuclease) may have a pH of from 2.5 to 3.5. A composition (e.g., a composition comprising a programmable nuclease) may have a pH of from 3 to 4. A composition (e.g., a composition comprising a programmable nuclease) may have a pH of from 3.5 to 4.5. A composition (e.g., a composition comprising a programmable nuclease) may have a pH of from 4 to 5. A composition (e.g., a composition comprising a programmable nuclease) may have a pH of from 4.5 to 5.5. A composition (e.g., a composition comprising a programmable nuclease) may have a pH of from 5 to 6. A composition (e.g., a composition comprising a programmable nuclease) may have a pH of from 5.5 to 6.5. A composition (e.g., a composition comprising a programmable nuclease) may have a pH of from 6 to 7. A composition (e.g., a composition comprising a programmable nuclease) may have a pH of from 6.5 to 7.5. A composition (e.g., a composition comprising a programmable nuclease) may have a pH of from 7 to 8. A composition (e.g., a composition comprising a programmable nuclease) may have a pH of from 7.5 to 8.5. A composition (e.g., a composition comprising a programmable nuclease) may have a pH of from 8 to 9. A composition (e.g., a composition comprising a programmable nuclease) may have a pH of from 8.5 to 9.5. A composition (e.g., a composition comprising a programmable nuclease) may have a pH of from 9 to 10. A composition (e.g., a composition comprising a programmable nuclease) may have a pH of from 9.5 to 10.5.

[0203] A buffer may comprise a salt. Exemplary salts include NaCl, KCl, magnesium acetate, potassium acetate, CaCl₂ and MgCl₂. A buffer may comprise potassium acetate, magnesium acetate, sodium chloride, magnesium chloride, or any combination thereof. A buffer compatible with a programmable nuclease may comprise a salt at a concentration of from 5 mM to 100 mM. A buffer compatible with a programmable nuclease may comprise a salt at a concentration of from 5 mM to 10 mM. In some embodiments, a buffer compatible with a programmable nuclease comprises a salt from 1 mM to 60 mM. In some embodiments, a buffer compatible with a programmable nuclease comprises a salt from 1 mM to 10 mM. In some embodiments, a buffer compatible with a programmable nuclease comprises a salt at about 105 mM. In some embodiments, a buffer compatible with a programmable nuclease comprises a salt at about 55 mM. In some embodiments, a buffer compatible with a programmable nuclease comprises a salt at about 7 mM. In some embodiments, a buffer compatible with a programmable nuclease comprises a salt, wherein the salt comprises potassium acetate and magnesium acetate. In some embodiments, a buffer compatible with a programmable nuclease comprises a salt, wherein the salt comprises sodium chloride and magnesium chloride. In some embodiments, a buffer compatible with a programmable nuclease comprises a salt, wherein the salt comprises potassium chloride and magnesium chloride.

[0204] A buffer may comprise a crowding agent. Exemplary crowding agents include glycerol and bovine serum albumin. A buffer may comprise glycerol. A crowding agent may reduce the volume of solvent available for other molecules in the solution, thereby increasing the effective concentrations of said molecules. A buffer compatible with a programmable nuclease may comprise a crowding agent at a concentration of from 0.01% (v/v) to 10% (v/v). A buffer compatible with a programmable nuclease may comprise a crowding agent at a concentration of from 0.5% (v/v) to 10% (v/v).

[0205] A buffer may comprise a detergent. Exemplary detergents include Tween, Triton-X, and IGEPAL. A buffer may comprise Tween, Triton-X, or any combination thereof. A buffer compatible with a programmable nuclease may comprise Triton-X. A buffer compatible with a programmable nuclease may comprise IGEPAL CA-630. In some embodiments, a buffer compatible with a programmable nuclease comprises a detergent at a concentration of 2% (v/v) or less. A buffer compatible with a programmable nuclease may comprise a detergent at a concentration of 2% (v/v) or less. A buffer compatible with a programmable nuclease may comprise a detergent at a concentration of from 0.00001% (v/v) to 0.01% (v/v). A buffer compatible with a programmable nuclease may comprise a detergent at a concentration of about 0.01% (v/v).

[0206] A buffer may comprise a reducing agent. Exemplary reducing agents comprise dithiothreitol (DTT), ß-mercaptoethanol (BME), or tris(2-carboxyethyl)phosphine (TCEP). A buffer compatible with a programmable nuclease may comprise DTT. A buffer compatible with a programmable nuclease may comprise a reducing agent at a concentration of from 0.01 mM to 100 mM. A buffer compatible with a programmable nuclease may comprise a reducing agent at a concentration of from 0.1 mM to 10 mM. A buffer compatible with a programmable nuclease may comprise a reducing agent at a concentration of from 0.5 mM to 2 mM. A buffer compatible with a programmable nuclease may comprise a reducing agent at a concentration of from 0.01 mM to 100 mM. A buffer compatible with a programmable nuclease may comprise a reducing agent at a concentration of from 0.1 mM to 10 mM. A buffer compatible with a programmable nuclease may comprise a reducing agent at a concentration of about 1 mM.

[0207] A buffer compatible with a programmable nuclease may comprise a competitor. Exemplary competitors compete with the target nucleic acid or the reporter nucleic acid for cleavage by the programmable nuclease. Exemplary competitors include heparin, and imidazole, and salmon sperm DNA. A buffer compatible with a programmable nuclease may comprise a competitor at a concentration of from 1 μg/mL to 100 μg/mL. A buffer compatible with a programmable nuclease may comprise a competitor at a concentration of from 40 μg/mL to 60 μg/mL.

[0208] In some embodiments, a programmable CasΦ nuclease is described as a “nickase” if the predominant cleavage product is a nicked nucleic acid when the target nucleic acid is a double-stranded nucleic acid. In some embodiments, a programmable CasΦ nuclease cleaves both strands of a double-stranded target nucleic acid. In some embodiments, the target nucleic acid is DNA. In some embodiments, the target nucleic acid is double-stranded DNA.

[0209] Where a programmable CasΦ nuclease disclosed herein cleaves both strands of a double-stranded target nucleic acid, the strand break may be a staggered cut with a 5′ overhang. In some embodiments, the 5′ overhang is an overhang of between 5 and 10 nucleotides. In some embodiments, the 5′ overhang is an overhang of 5 or 6 nucleotides. In some embodiments, the 5′ overhang is an overhang of 9 or 10 nucleotides.

[0210] In some embodiments, where the programmable CasΦ nuclease or a variant thereof comprises at least 70%, at least 75%, at least 80%, at least 85%, at least 90%, at least 92%, at least 95%, at least 97%, at least 99%, or 100% sequence identity with SEQ ID NO: 20, the 5′ overhang is a 9 or 10 nucleotide overhang. In preferred embodiments, where the programmable CasΦ nuclease or a variant thereof comprises at least 90% sequence identity with SEQ ID NO: 20, the 5′ overhang is a 9 or 10 nucleotide overhang. In further preferred embodiments, where the programmable CasΦ nuclease or a variant thereof comprises the amino acid sequence of SEQ ID NO: 20, the 5′ overhang is a 9 or 10 nucleotide overhang.

[0211] In some embodiments, where the programmable CasΦ nuclease or a variant thereof comprises at least 70%, at least 75%, at least 80%, at least 85%, at least 90%, at least 92%, at least 95%, at least 97%, at least 99%, or 100% sequence identity with SEQ ID NO: 22, the 5′ overhang is a 9 or 10 nucleotide overhang. In preferred embodiments, where the programmable CasΦ nuclease or a variant thereof comprises at least 90% sequence identity with SEQ ID NO: 22, the 5′ overhang is a 10 nucleotide overhang. In further preferred embodiments, where the programmable CasΦ nuclease or a variant thereof comprises the amino acid sequence of SEQ ID NO: 22, the 5′ overhang is a 10 nucleotide overhang.

[0212] In some embodiments, where the programmable CasΦ nuclease or a variant thereof comprises at least 70%, at least 75%, at least 80%, at least 85%, at least 90%, at least 92%, at least 95%, at least 97%, at least 99%, or 100% sequence identity with SEQ ID NO: 28, the 5′ overhang is a 9 nucleotide overhang. In preferred embodiments, where the programmable CasΦ nuclease or a variant thereof comprises at least 90% sequence identity with SEQ ID NO: 28, the 5′ overhang is a 9 nucleotide overhang. In further preferred embodiments, where the programmable CasΦ nuclease or a variant thereof comprises the amino acid sequence of SEQ ID NO: 28, the 5′ overhang is a 9 nucleotide overhang.

[0213] In some embodiments, where the programmable CasΦ nuclease or a variant thereof comprises at least 70%, at least 75%, at least 80%, at least 85%, at least 90%, at least 92%, at least 95%, at least 97%, at least 99%, or 100% sequence identity with SEQ ID NO: 40, the 5′ overhang is a 10 nucleotide overhang. In preferred embodiments, where the programmable CasΦ nuclease or a variant thereof comprises at least 90% sequence identity with SEQ ID NO: 40, the 5′ overhang is a 10 nucleotide overhang. In further embodiments, where the programmable CasΦ nuclease or a variant thereof comprises the amino acid sequence of SEQ ID NO: 40, the 5′ overhang is a 10 nucleotide overhang.

[0214] In some embodiments, where the programmable CasΦ nuclease or a variant thereof comprises at least 70%, at least 75%, at least 80%, at least 85%, at least 90%, at least 92%, at least 95%, at least 97%, at least 99%, or 100% sequence identity with SEQ ID NO: 37, the 5′ overhang is a 9 or 10 nucleotide overhang. In preferred embodiments, where the programmable CasΦ nuclease or a variant thereof comprises at least 90% sequence identity with SEQ ID NO: 37, the 5′ overhang is a 9 or 10 nucleotide overhang. In further preferred embodiments, where the programmable CasΦ nuclease or a variant thereof comprises the amino acid sequence of SEQ ID NO: 37, the 5′ overhang is a 9 or 10 nucleotide overhang.

[0215] In some embodiments, where the programmable CasΦ nuclease or a variant thereof comprises at least 70%, at least 75%, at least 80%, at least 85%, at least 90%, at least 92%, at least 95%, at least 97%, at least 99%, or 100% sequence identity with SEQ ID NO: 41, the 5′ overhang is a 9 or 10 nucleotide overhang. In preferred embodiments, where the programmable CasΦ nuclease or a variant thereof comprises at least 90% sequence identity with SEQ ID NO: 41, the 5′ overhang is a 9 or 10 nucleotide overhang. In further preferred embodiments, where the programmable CasΦ nuclease or a variant thereof comprises the amino acid sequence of SEQ ID NO: 41, the 5′ overhang is a 9 or 10 nucleotide overhang.

[0216] In some embodiments, where the programmable CasΦ nuclease or a variant thereof comprises at least 70%, at least 75%, at least 80%, at least 85%, at least 90%, at least 92%, at least 95%, at least 97%, at least 99%, or 100% sequence identity with SEQ ID NO: 12, the 5′ overhang is a 5 nucleotide overhang. In preferred embodiments, where the programmable CasΦ nuclease or a variant thereof comprises at least 90% sequence identity with SEQ ID NO: 12, the 5′ overhang is a 5 nucleotide overhang. In further preferred embodiments, where the programmable CasΦ nuclease or a variant thereof comprises the amino acid sequence of SEQ ID NO: 12, the 5′ overhang is a 5 nucleotide overhang.

[0217] In some embodiments, where the programmable CasΦ nuclease or a variant thereof comprises at least 70%, at least 75%, at least 80%, at least 85%, at least 90%, at least 92%, at least 95%, at least 97%, at least 99%, or 100% sequence identity with SEQ ID NO: 24, the 5′ overhang is a 6 nucleotide overhang. In preferred embodiments, where the programmable CasΦ nuclease or a variant thereof comprises at least 90% sequence identity with SEQ ID NO: 24, the 5′ overhang is a 6 nucleotide overhang. In further preferred embodiments, where the programmable CasΦ nuclease or a variant thereof comprises the amino acid sequence of SEQ ID NO: 24, the 5′ overhang is a 6 nucleotide overhang.

[0218] In some embodiments, where the programmable CasΦ nuclease or a variant thereof comprises at least 70%, at least 75%, at least 80%, at least 85%, at least 90%, at least 92%, at least 95%, at least 97%, at least 99%, or 100% sequence identity with SEQ ID NO: 25, the 5′ overhang is a 6 nucleotide overhang. In preferred embodiments, where the programmable CasΦ nuclease or a variant thereof comprises at least 90% sequence identity with SEQ ID NO: 25, the 5′ overhang is a 6 nucleotide overhang. In further preferred embodiments, where the programmable CasΦ nuclease or a variant thereof comprises the amino acid sequence of SEQ ID NO: 25, the 5′ overhang is a 6 nucleotide overhang.

[0219] In some embodiments, where the programmable CasΦ nuclease or a variant thereof comprises at least 70%, at least 75%, at least 80%, at least 85%, at least 90%, at least 92%, at least 95%, at least 97%, at least 99%, or 100% sequence identity with SEQ ID NO: 32, the 5′ overhang is a 6 nucleotide overhang. In preferred embodiments, where the programmable CasΦ nuclease or a variant thereof comprises at least 90% sequence identity with SEQ ID NO: 32, the 5′ overhang is a 6 nucleotide overhang. In further preferred embodiments, where the programmable CasΦ nuclease or a variant thereof comprises the amino acid sequence of SEQ ID NO: 32, the 5′ overhang is a 6 nucleotide overhang.

[0220] In some embodiments, where the programmable CasΦ nuclease or a variant thereof comprises at least 70%, at least 75%, at least 80%, at least 85%, at least 90%, at least 92%, at least 95%, at least 97%, at least 99%, or 100% sequence identity with SEQ ID NO: 33, the 5′ overhang is a 6 nucleotide overhang. In preferred embodiments, where the programmable CasΦ nuclease or a variant thereof comprises at least 90% sequence identity with SEQ ID NO: 33, the 5′ overhang is a 6 nucleotide overhang. In further preferred embodiments, where the programmable CasΦ nuclease or a variant thereof comprises the amino acid sequence of SEQ ID NO: 33, the 5′ overhang is a 6 nucleotide overhang.

[0221] In some embodiments, a programmable CasΦ nuclease rapidly cleaves a strand of a double-stranded target nucleic acid. In some embodiments, the programmable CasΦ nuclease cleaves the second strand of the target nucleic acid after it has cleaved the first strand of the target nucleic acid. The cleavage of target nucleic acid strands can be assessed in an in vitro cis-cleavage assay. To perform such as assay, the programmable CasΦ nuclease is complexed to its native crRNA, e.g. CasΦ.2 nuclease with the CasΦ.2 repeat, in buffer comprising 50 mM potassium acetate, 20 mM Tris-acetate, 10 mM magnesium acetate, 100 ug/ml BSA, and which is pH 7.9 at 25° C. The complexing is carried out for 20 minutes at room temperature, e.g. 20-22° C. The RNP is at a concentration of 200 nM. The target plasmid is a 2.2 kb super-coiled plasmid containing a target sequence, either 5′-TATTAAATACTCGTATTGCTGTTCGATTAT-3′ (SEQ ID NO: 116) or 5′-CACAGCTTGTCTGTAAGCGGATGCCATATG-3′ (SEQ ID NO: 117), which is immediately downstream of a 5′-GTTG-3′ or 5′-TTTG-3′ PAM. At time “0” 30 equal volumes of target plasmid, at 20 nM, and complexed RNP are mixed, so that the concentration of target plasmid is 10 nM and the concentration of complexed RNP is 100 nM. The incubation temperature is 37° C. The reaction is quenched at desired time points, e.g. 1, 3, 6, 15, 30 and 60 minutes, with reaction quench comprising 1 mg/ml proteinase K, 0.08% SDS and 15 mM EDTA. The sample incubates for 30 minutes at 37° C. to deproteinize. The cleavage is quantified by agarose gel analysis.

[0222] In some embodiments, a programmable CasΦ nuclease creates at least 50%, at least 55%, at least 60%, at least 65%, at least 70%, at least 75%, at least 80%, at least 85%, at least 90 or at least 95% of the maximum amount of nicked product within 1 minute, where the maximum amount of nicked product is the maximum amount detected within a 60 minute period from when the target plasmid is mixed with the programmable CasΦ nuclease. In preferred embodiments, at least 80% of the maximum amount of nicked product is created within 1 minute. In more preferred embodiments, at least 90% of the maximum amount of nicked product is created within 1 minute.

[0223] In some embodiments, a programmable CasΦ nuclease creates at least 50%, at least 55%, at least 60%, at least 65%, at least 70%, at least 75%, at least 80%, at least 85%, at least 90 or at least 95% of the maximum amount of linearized product is created within 1 minute, where the maximum amount of linearized product is the maximum amount detected within a 60 minute period from when the target plasmid is mixed with the programmable CasΦ nuclease. In preferred embodiments, at least 80% of the maximum amount of linearized product is created within 1 minute. In more preferred embodiments, at least 90% of the maximum amount of linearized product is created within 1 minute.

[0224] In some embodiments, a programmable CasΦ nuclease uses a co-factor. In some embodiments, the co-factor allows the programmable CasΦ nuclease to perform a function. In some embodiments, the function is pre-crRNA processing and/or target nucleic acid cleavage. As discussed in Jiang F. and Doudna J. A. (Annu. Rev. Biophys. 2017. 46:505-29), Cas9 uses divalent metal ions as co-factors. The suitability of a divalent metal ion as a cofactor can easily be assessed, such as by methods based on those described by Sundaresan et al. (Cell Rep. 2017 Dec. 26; 21(13): 3728-3739). In some embodiments, the co-factor is a divalent metal ion. In some embodiments, the divalent metal ion is selected from Mg²⁺, Mn²⁺, Zn²⁺, Ca²⁺, cu²⁺. In a preferred embodiment, the divalent metal ion is Mg²⁺. In some embodiments, a programmable CasΦ nuclease forms a complex with a divalent metal ion. In preferred embodiments, a programmable CasΦ nuclease forms a complex with Mg²⁺.

[0225] In some aspects, the disclosure provides a composition comprising a programmable CasΦ nuclease disclosed herein and a cell, preferably wherein the cell is a eukaryotic cell. In some embodiments, a programmable CasΦ nuclease disclosed herein is in a cell, preferably wherein the cell is a eukaryotic cell.

[0226] In some aspects, the disclosure provides a composition comprising a nucleic acid encoding a programmable CasΦ nuclease disclosed herein and a cell, preferably wherein the cell is a eukaryotic cell. In some embodiments, a nucleic acid encoding a programmable CasΦ nuclease disclosed herein is in a cell, preferably wherein the cell is a eukaryotic cell.

### Guide Nucleic Acids

[0227] The methods and compositions of the disclosure may comprise a guide nucleic acid. The guide nucleic acid can bind to a target nucleic acid (e.g., a single strand of a target nucleic acid) or portion thereof. For example, the guide nucleic acid can bind to a target nucleic acid such as nucleic acid from a virus or a bacterium or other agents responsible for a disease, or an amplicon thereof, as described herein. The guide nucleic acid can bind to a target nucleic acid such as a nucleic acid from a bacterium, a virus, a parasite, a protozoa, a fungus or other agents responsible for a disease, or an amplicon thereof, as described herein. The target nucleic acid can comprise a mutation, such as a single nucleotide polymorphism (SNP). A mutation can confer for example, resistance to a treatment, such as antibiotic treatment. A mutation can confer a gene malfunction or gene knockout. A mutation can confer a disease, contribution to a disease, or risk for a disease, such as a liver disease or disorder, eye disease or disorder, cystic fibrosis, or muscle disease or disorder. The guide nucleic acid can bind to a target nucleic acid such as a nucleic acid, preferably DNA, from a cancer gene or gene associated with a genetic disorder, or an amplicon thereof, as described herein. The guide nucleic acid comprises a segment of nucleic acids that are reverse complementary to the target nucleic acid. Often the guide nucleic acid binds specifically to the target nucleic acid. The target nucleic acid may be a reversed transcribed RNA, DNA, DNA amplicon, or synthetic nucleic acids. The target nucleic acid can be a single-stranded DNA or DNA amplicon of a nucleic acid of interest. A guide nucleic acid may be a non-naturally occurring guide nucleic acid. A non-naturally occurring guide nucleic acid may comprise an engineered sequence having a repeat and a spacer that hybridizes to a target nucleic acid sequence of interest. A non-naturally occurring guide nucleic acid may be recombinantly expressed or chemically synthesized.

[0228] A guide nucleic acid (e.g. gRNA) may hybridize to a target sequence of a target nucleic acid. The guide nucleic acid can bind to a programmable nuclease.

[0229] In some embodiments, a gRNA comprises a crRNA. In some embodiments, a gRNA of a CasΦ polypeptide or variants thereof does not comprise a tracrRNA. As described by Jiang F. and Doudna J. A. (Annu. Rev. Biophys. 2017. 46:505-29), Cas9 cleavage activity requires a tracrRNA. A tracrRNA is a polynucleotide that hybridizes with a crRNA to allow crRNA maturation such that the crRNA can bind to the Cas nuclease and locate the Cas nuclease to a target sequence. In some embodiments, a programmable CasΦ nuclease disclosed herein does not require a tracrRNA to locate and/or cleave a target nucleic acid. A crRNA may comprise a repeat region. Specifically, the crRNA of the guide nucleic acid may comprise a repeat region and a spacer region. The repeat region refers to the sequence of the crRNA that binds to the programmable nuclease. The spacer region refers to the sequence of the crRNA that hybridizes to a sequence of the target nucleic acid. In some embodiments, the repeat region may comprise mutations or truncations with respect to the repeat sequences in pre-crRNA. The repeat sequence of the crRNA may interact with a programmable nuclease, allowing for the guide nucleic acid and the programmable nuclease to form a complex. This complex may be referred to as a ribonucleoprotein (RNP) complex. The crRNA may comprise a spacer sequence. The spacer sequence may hybridize to a target sequence of the target nucleic acid, where the target sequence is a segment of a target nucleic acid. The spacer sequences may be reverse complementary to the target sequence. In some cases, the spacer sequence may be sufficiently reverse complementary to a target sequence to allow for hybridization, however, may not necessarily be 100% reverse complementary.

[0230] In some embodiments, a programmable nuclease may cleave a precursor RNA (“pre-crRNA”) to produce (or “process”) a guide RNA (gRNA), also referred to as a “mature guide RNA.” A programmable nuclease that cleaves pre-crRNA to produce a mature guide RNA is said to have pre-crRNA processing activity.

[0231] Programmable nucleases disclosed herein may process the repeat sequence of a crRNA, where the repeat sequence is the region of the crRNA that binds to the programmable nuclease. For example, crRNA may be delivered to a mammalian cell, e.g. a HEK293T cell, wherein the crRNA includes a full length repeat region which is 36 nucleotides in length, along with a programmable nuclease. The programmable nuclease then cleaves the repeat region of the crRNA so that the mature crRNA comprises a shorter repeat region (e.g. 24 nucleotides in length). Accordingly, in some embodiments, programmable nucleases disclosed herein are capable of cleaving the repeat region of a crRNA. In preferred embodiments, programmable nucleases disclosed herein are capable of cleaving the repeat region of a crRNA in mammalian cells.

[0232] The guide nucleic acid can bind specifically to the target nucleic acid. A guide nucleic acid can comprise a sequence that is, at least in part, reverse complementary to the sequence of a target nucleic acid.

[0233] The guide nucleic acid may be a non-naturally occurring guide nucleic acid. A non-naturally occurring guide nucleic acid may comprise an engineered sequence having a repeat and a spacer that hybridizes to a target nucleic acid sequence of interest. A non-naturally occurring guide nucleic acid may be recombinantly expressed or chemically synthesized.

[0234] A guide nucleic acid can comprise RNA, DNA, or a combination thereof. The term “gRNA” refers to a guide nucleic acid comprising RNA. A gRNA may include nucleosides that are not ribonucleic. In some embodiments, all nucleosides in a gRNA are ribonucleic. In some embodiments, some of the nucleosides in a gRNA are not ribonucleic. In embodiments where nucleosides in a gRNA are not ribonucleic, non-ribonucleic nucleosides may be naturally-occurring or non-naturally-occurring nucleosides. In some embodiments, inter-nucleoside links are phosphodiester bonds. In some embodiments, the inter-nucleoside link between at least two nucleosides in a guide nucleic acid is not a phosphodiester bond. In some embodiments, the inter-nucleoside link between at least two nucleosides is a non-natural inter-nucleoside linkage. Non-natural inter-nucleoside linkages include phosphorous and non-phosphorous inter-nucleoside linkages. Phosphorous inter-nucleoside linkages include phosphorothioate linkages and thiophosphate linkages. An inter-nucleoside linkage may comprise a “C3 spacer”. C3 spacers are known to the skilled person as comprising a chain of three carbon atoms.

[0235] Guide nucleic acids may be modified to improve genome editing efficiency, increase stability, reduce off-target effects, and/or increase the affinity of the guide nucleic acid for a CasΦ polypeptide disclosed herein. Modifications may include non-natural nucleotides and/or non-natural linkages. In addition or alternatively, one or more sugar moieties of the guide nucleic acid may be modified. Such sugar moiety modifications may include 2′-O-methyl (2′OMe), 2′-0-methyoxy-ethyl and 2′ fluoro. In some embodiments, editing efficiency, or genome editing efficiency, is determined by analyzing the frequency of indel mutations in a nucleic acid or gene knockout. In some embodiments, the use of a flow cytometer or next generation sequencing may be used to analyze cells for indel mutations or gene knockout. In other embodiments, off-target effects may be detected using a flow cytometer, next generation sequencing, or CIRCLE-seq.

[0236] In some preferred embodiments, first 3 nucleosides (or one of the first 3 nucleosides, or a combination of the first 3 nucleosides) from the 5′ end of the repeat region comprise a 2′methyl modification and the linkages between the 3 nucleosides at the 3′ end of the spacer region comprise phosphorothioate linkages.

[0237] In some embodiments, the first nucleoside at the 5′ end of the repeat region comprises a 2′-O-methyl modification. In some embodiments, the first two nucleosides at the 5′ end of the repeat region comprise 2′-O-methyl modifications. In some embodiments, the first three nucleosides at the 5′ end of the repeat region comprise 2′-O-methyl modifications. In some embodiments, the last nucleoside at the 3′ end of the spacer region comprises a 2′-O-methyl modification. In some embodiments, the last two nucleosides at the 3′ end of the spacer region comprise 2′-O-methyl modifications. In some embodiments, the last three nucleosides at the 3′ end of the spacer region comprise 2′-O-methyl modifications.

[0238] In some embodiments, the first 3 nucleosides (or one of the first 3 nucleosides, or a combination of the first 3 nucleosides) from the 5′ end of the repeat region and the 3 nucleosides at the 3′ end of the spacer region comprise a 2′-O-methyl modification, and the linkages between the 3 nucleosides at the 3′ end of the spacer region comprise phosphorothioate linkages.

[0239] In some embodiments, the first 3 nucleosides (or one of the first 3 nucleosides, or a combination of the first 3 nucleosides) from the 5′ end of the repeat region and the 3 nucleosides at the 3′ end of the spacer region comprise a 2′ fluoro modification.

[0240] In some embodiments, the first nucleoside at the 5′ end of the repeat region comprises a 2′ fluoro modification. In some embodiments, the first two nucleosides at the 5′ end of the repeat region comprise 2′ fluoro modifications. In some embodiments, the first three nucleosides at the 5′ end of the repeat region comprise 2′ fluoro modifications. In some embodiments, the last nucleoside at the 3′ end of the spacer region comprises a 2′ fluoro modification. In some embodiments, the last two nucleosides at the 3′ end of the spacer region comprise 2′ fluoro modifications. In some embodiments, the last three nucleosides at the 3′ end of the spacer region comprise 2′ fluoro modifications. In preferred embodiments, the last three nucleosides at the 3′ end of the spacer region comprise 2′ fluoro modifications.

[0241] In preferred embodiments, the first two nucleosides at the 5′ end of the repeat region comprise 2′-O-methyl modifications, the first two nucleosides at the 5′ end of the repeat are linked by a phosphorothioate linkage, and the last three nucleosides at the 3′ end of the spacer region comprise 2′ fluoro modifications.

[0242] In some embodiments, the linkage between the two nucleosides at the 5′ end of the repeat region comprises a 3C spacer and the linkage between the two nucleosides at the 3′ end of the spacer region comprises a 3C spacer.

[0243] In some embodiments, the guide nucleic acid comprises ribonucleic nucleosides and deoxyribonucleic nucleosides. In some embodiments, the guide nucleic acid is a guide RNA wherein the first, eighth and ninth nucleosides from the 5′ end of the spacer region and the four nucleosides at the 3′ end of the spacer region are deoxyribonucleic nucleosides.

[0244] In some embodiments, the guide nucleic acid comprises a polyA tail. In some preferred embodiments, the guide nucleic acid comprises a polyA tail at the 3′ end of the spacer region.

[0245] In some embodiments, a plurality of modified guides (e.g., a combination of modified guides disclosed herein) are complexed with one or more programmable nucleases (e.g., one or more programmable nucleases disclosed herein). In some examples, one or more of the plurality of modified guides comprise any of the nucleoside modifications described herein. In some examples, one or more of the plurality of the modified guides comprise any length of repeat or spacer region described herein. In some examples, one or more of the plurality of the modified guides comprise a repeat spacer length described herein, and a nucleoside modification described herein. In some embodiments, one or more of the plurality of modified guides comprise a repeat sequence from about 15 to about 20 nucleotides in length. In some embodiments, one or more of the plurality of modified guides comprise a spacer sequence or region from about 15 to about 20 nucleotides in length.

[0246] TABLE 2 provides illustrative crRNA sequences for use with the compositions and methods of the disclosure. In some embodiments, the crRNA sequence comprises at least 70%, at least 80%, at least 90%, at least 92%, at least 95%, at least 97%, or at least 99%, or 100% sequence identity to any one of SEQ ID NO: 48-SEQ ID NO: 86, or a reverse complement thereof. In some embodiments, the crRNA sequence comprises at least 70%, at least 80%, at least 90%, at least 92%, at least 95%, at least 97%, at least 99%, or 100% sequence identity to SEQ ID NO: 49 or a reverse complement thereof. In some embodiments, the crRNA sequence comprises at least 70%, at least 80%, at least 90%, at least 92%, at least 95%, at least 97%, at least 99%, or 100% sequence identity to SEQ ID NO: 51 or a reverse complement thereof. In some embodiments, the crRNA sequence comprises at least 70%, at least 80%, at least 90%, at least 92%, at least 95%, at least 97%, at least 99%, or 100% sequence identity to SEQ ID NO: 52 or a reverse complement thereof. In some embodiments, the crRNA sequence comprises at least 70%, at least 80%, at least 90%, at least 92%, at least 95%, at least 97%, at least 99%, or 100% sequence identity to SEQ ID NO: 54 or a reverse complement thereof. In some embodiments, the crRNA sequence comprises at least 70%, at least 80%, at least 90%, at least 92%, at least 95%, at least 97%, at least 99%, or 100% sequence identity to SEQ ID NO: 57 or a reverse complement thereof.

TABLE 2
Illustrative crRNA sequences

| | | SEQ |
|---|---|---|
| CasΦ | crRNA repeat sequence | ID. |
| ortholog | (shown as DNA), 5′-to-3′ | NO. |
| CasΦ.01 | GGAGAGATCTCAAACGATTGCTCGATTAGTCGAGAC | 48 |
| CasΦ.02 | GTCGGAACGCTCAACGATTGCCCCTCACGAGGGGAC | 49 |
| CasΦ.04 | ACCAAAACGACTATTGATTGCCCAGTACGCTGGGAC | 50 |
| CasΦ.07 | GGATCCAATCCTTTTTGATTGCCCAATTCGTTGG | 51 |
| | GAC | |
| CasΦ.10 | GGATCTGAGGATCATTATTGCTCGTTACGACGAGAC | 52 |
| CasΦ.11 | CCTGCGAAACCTTTTGATTGCTCAGTACGCTGAGAC | 53 |
| CasΦ.12 | CTTTCAAGACTAATAGATTGCTCCTTACGAGGAGAC | 54 |
| CasΦ.13 | GTAGAAGACCTCGCTGATTGCTCGGTGCGCCGAGAC | 55 |
| CasΦ.17 | ATGGCAACAGACTCTCATTGCGCGGTACGCCGCGAC | 56 |
| CasΦ.18 | ACCAAAACGACTATTGATTGCCCAGTACGCTGGGAC | 57 |
| CasΦ.19 | GTCGCTCTCTAACGCTTGCCCAGTACGCTGGGAC | 58 |
| CasΦ.20 | GCTGGAAGACTCAATGATGGCTCCTTACGAGGAGAC | 59 |
| CasΦ.21 | GGTTGAACCCTCAACAGATTGCTCGGTAAGCCGAG | 60 |
| | AC | |
| CasΦ.22 | GGTTGAACCCTCAACAGATTGCTCGGTAAGCCGAG | 61 |
| | AC | |
| CasΦ.23 | CTTGAAATCCTGTCAGATTGCTCCCTTCGGGGAGAC | 62 |
| CasΦ.24 | GCTGGAAGACTCAATGATGGCTCCTTACGAGGAGAC | 63 |
| CasΦ.25 | GCTGGAAGACTCAATGATGGCTCCTTACGAGGAGAC | 64 |
| CasΦ.26 | CTAGGAACGCACGCAGATTGCTCGGTACGCCGAGAC | 65 |
| CasΦ.27 | ATTGCAACGCCTAAAGATTGCTCGATACGTCGAGAC | 66 |
| CasΦ.28 | GTTCGGCRAYCCTTTGATTGCTCAGTACGCTGAGAC | 67 |
| CasΦ,29 | GTTGAACCTAGATCAGATGGCTCAGTACGCTGAGAC | 68 |
| CasΦ.30 | CCCTCAACACGTCAGAAATGCCCGGCACGCCGGGAC | 69 |
| CasΦ.31 | GTCGCAAGACTCGAATAATTGCCCCTCTATGGGGAC | 70 |
| CasΦ.32 | GCTGGGGACCGATCCTGATTGCTCGCTGCGGCGAGAC | 71 |
| CasΦ.33 | CTCTCAATGGATAACGATTGCTCTCTACGGAGAGAC | 72 |
| CasΦ.34 | GCTGGAAGACTCAATGATGGCTCCTTACGAGGAGAC | 73 |
| CasΦ.35 | GTTGAACCCTCAACAGATTGCTCGGTAAGCCGAGAC | 74 |
| CasΦ.36 | GTCGCAAGACTCGAATAATTGCCCCTCTATGGGGAC | 75 |
| CasΦ.37 | GTCGGAACGCTCAACGATTGCCCCTCACGAGGGGAC | 76 |
| CasΦ.38 | GTTGAACCTAGATCAGATGGCTCAGTACGCTGAGAC | 77 |
| CasΦ.39 | CTCTCAATGGATAACGATTGCTCTCTACGGAGAGAC | 78 |
| CasΦ.41 | ACTGAAACCACCAACGATTGCGCTCCTCGGAGCGAC | 79 |
| CasΦ.42 | ACCAAAACGACTATTGATTGCCCAGTACGCTGGGAC | 80 |
| CasΦ.43 | GTTGAACCTAGATCAGATGGCTCAGTACGCTGAGAC | 81 |
| CasΦ.44 | GTTGAACCCTCAACAGATTGCTCGGTAAGCCGAGAC | 82 |
| CasΦ.45 | GTTGAACCTAGATCAGATGGCTCAGTACGCTGAGAC | 83 |
| CasΦ.46 | GTCGGAACGCTCAACGATTGCCCCTCACGAGGGGAC | 84 |
| CasΦ.47 | GGTTGAACCCTCAACAGATTGCTCGGTAAGCCGAG | 85 |
| | AC | |
| CasΦ.48 | GGTTGAACCCTCAACAGATTGCTCGGTAAGCCGAG | 86 |
| | AC | |

[0247] In some embodiments, the programmable nuclease disclosed herein is used in conjunction with a specific crRNA sequence. In some embodiments, the crRNA sequence comprises at least 70%, at least 80%, at least 90%, at least 92%, at least 95%, at least 97%, at least 99%, or 100% sequence identity to any one of SEQ ID NO: 48-SEQ ID NO: 86, or a reverse complement thereof. In some embodiments, the crRNA sequence comprises at least 70%, at least 80%, at least 90%, at least 92%, at least 95%, at least 97%, at least 99%, or 100% sequence identity to SEQ ID NO: 49 or a reverse complement thereof. In some embodiments, the crRNA sequence comprises at least 70%, at least 80%, at least 90%, at least 92%, at least 95%, at least 97%, at least 99%, or 100% sequence identity to SEQ ID NO: 51 or a reverse complement thereof. In some embodiments, the crRNA sequence comprises at least 70%, at least 80%, at least 90%, at least 92%, at least 95%, at least 97%, at least 99%, or 100% sequence identity to SEQ ID NO: 52 or a reverse complement thereof. In some embodiments, the crRNA sequence comprises at least 70%, at least 80%, at least 90%, at least 92%, at least 95%, at least 97%, at least 99%, or 100% sequence identity to SEQ ID NO: 54 or a reverse complement thereof. In some embodiments, the crRNA sequence comprises at least 70%, at least 80%, at least 90%, at least 92%, at least 95%, at least 97%, at least 99%, or 100% sequence identity to SEQ ID NO: 57 or a reverse complement thereof.

[0248] In some embodiments, the activity of a programmable CasΦ nuclease can be supported by a crRNA comprising any of the crRNA repeat sequences recited in TABLE 2. In some embodiments, the activity of a programmable CasΦ nuclease can be supported by a crRNA comprising a crRNA repeat sequence comprising at least 70%, at least 80%, at least 90%, at least 92%, at least 95%, at least 97%, at least 99%, or 100% sequence identity to any one of SEQ ID NO: 48-SEQ ID NO: 86.

[0249] In some embodiments, the crRNA repeat sequence comprises a hairpin. In some embodiments, the hairpin is in the 3′ portion of the crRNA repeat sequence. The hairpin comprises a double-stranded stem portion and a single-stranded loop portion. In preferred embodiments, one stand of the stem portion comprises a CYC sequence and the other strand comprises a GRG sequence, wherein Y and R are complementary. In preferred embodiments, the crRNA repeat comprises a GAC sequence at the 3′ end. In more preferred embodiments, the G of the GAC sequence is in the stem portion of the hairpin. In some embodiments, each strand of the stem portion comprises 3, 4, 5, 6, 7, 8, 9 or 10 nucleotides. In preferred embodiments, each strand of the stem portion comprises 3, 4 or 5 nucleotides. In some embodiments, the loop portion comprises 2, 3, 4, 5, 6, 7, 8, 9, 10 or more nucleotides. In preferred embodiments, the loop portion comprises 2, 3, 4, 5 or 6 nucleotides. In most preferred embodiments, the loop portion comprises 4 nucleotides. In some embodiments, the nucleotides are naturally occurring nucleotides. In some embodiments, the nucleotides are synthetic nucleotides.

[0250] In some cases, the guide nucleic acid is not naturally occurring and made by artificial combination of otherwise separate segments of sequence. Often, the artificial combination is performed by chemical synthesis, by genetic engineering techniques, or by the artificial manipulation of isolated segments of nucleic acids. In some cases, the segment of a guide nucleic acid that comprises a sequence that is reverse complementary to the target nucleic acid is 20 nucleotides in length. A guide nucleic acid can have at least 10, 11, 12, 13, 14, 15, 16, 17, 18, 19, 20, 21, 22, 23, 24, 25, 26, 27, 28, 29, or 30 nucleotides reverse complementary to a target nucleic acid. In some cases, the guide nucleic acid can be 10, 11, 12, 13, 14, 15, 16, 17, 18, 19, 20, 21, 22, 23, 24, 25, 26, 27, 28, 29, or 30 nucleotides in length. For example, a guide nucleic acid may be at least 10 bases. In some embodiments, a guide nucleic acid may be from 10 to 50 bases. In some embodiments, a guide nucleic acid may be at least 25 bases. In some cases, the guide nucleic acid has from exactly or about 12 nucleotides (nt) to about 80 μL, from about 12 μL to about 50 μL, from about 12 μL to about 45 μL, from about 12 μL to about 40 μL, from about 12 μL to about 35 μL, from about 12 μL to about 30 μL, from about 12 μL to about 25 μL, from about 12 μL to about 20 μL, from about 12 μL to about 19 μL, from about 19 μL to about 20 μL, from about 19 μL to about 25 μL, from about 19 μL to about 30 μL, from about 19 μL to about 35 μL, from about 19 μL to about 40 μL, from about 19 μL to about 45 μL, from about 19 μL to about 50 μL, from about 19 μL to about 60 μL, from about 20 μL to about 25 μL, from about 20 μL to about 30 μL, from about 20 μL to about 35 μL, from about 20 μL to about 40 μL, from about 20 μL to about 45 μL, from about 20 μL to about 50 μL, or from about 20 μL to about 60 μL reverse complementary to a target nucleic acid. In some cases, the guide nucleic acid has from about 10 μL to about 60 μL, from about 20 μL to about 50 μL, or from about 30 μL to about 40 μL reverse complementary to a target nucleic acid. It is understood that the sequence of a guide nucleic acid need not be 100% reverse complementary to that of its target nucleic acid to be specifically hybridizable, hybridizable, or bind specifically. The guide nucleic acid can have a sequence comprising at least one uracil in a region from nucleic acid residue 5 to 20 that is reverse complementary to a modification variable region in the target nucleic acid. The guide nucleic acid, in some cases, has a sequence comprising at least one uracil in a region from nucleic acid residue 5 to 9, 10 to 14, or 15 to 20 that is reverse complementary to a modification variable region in the target nucleic acid. The guide nucleic acid can have a sequence comprising at least one uracil in a region from nucleic acid residue 5 to 20 that is reverse complementary to a methylation variable region in the target nucleic acid. The guide nucleic acid, in some cases, has a sequence comprising at least one uracil in a region from nucleic acid residue 5 to 9, 10 to 14, or 15 to 20 that is reverse complementary to a methylation variable region in the target nucleic acid. The guide nucleic acid can hybridize with a target nucleic acid.

[0251] In some instances, compositions comprise shorter versions of the guide nucleic acids disclosed herein. For instance, the guide nucleic acid sequence may consist of a portion of a guide nucleic acid disclosed herein. In some instances, shorter versions may provide enhanced activity relative to their longer versions. Examples of longer versions and shorter versions of guide RNA for CasΦ.12 are shown in Tables I, K, M, O, Q, S, U, and W, and Tables AB-AF, respectively, wherein the shorter versions are produced by removing sixteen nucleotides from the 5′ end of the long version and three nucleotides from the 3′ end of the long version. In some instances, the long version is a CasΦ.32 guide nucleic acid described in Tables J, L, N, P, R, T, V, X, and the short version is a guide nucleic acid without the sixteen nucleotides at the 5′ end of the long version and without the three nucleotides at the 3′ end of the long version.

[0252] The guide nucleic acid (e.g., a non-naturally occurring guide nucleic acid) can be selected from a group of guide nucleic acids that have been tiled against the nucleic acid sequence of a strain of an infection or genomic locus of interest. The guide nucleic acid can be selected from a group of guide nucleic acids that have been tiled against the nucleic acid sequence of a target nucleic acid, for example, a strain of HPV16 or HPV18. Often, guide nucleic acids that are tiled against the nucleic acid of a strain of an infection or genomic locus of interest can be pooled for use in a method described herein. Often, these guide nucleic acids are pooled for detecting a target nucleic acid in a single assay. The pooling of guide nucleic acids that are tiled against a single target nucleic acid can enhance the detection of the target nucleic using the methods described herein. The pooling of guide nucleic acids that are tiled against a single target nucleic acid can ensure broad coverage of the target nucleic acid within a single reaction using the methods described herein. The tiling, for example, is sequential along the target nucleic acid. Sometimes, the tiling is overlapping along the target nucleic acid. In some instances, the tiling comprises gaps between the tiled guide nucleic acids along the target nucleic acid. In some instances, the tiling of the guide nucleic acids is non-sequential. Often, a method for detecting a target nucleic acid comprises contacting a target nucleic acid to a pool of guide nucleic acids and a programmable nuclease or nickase as disclosed herein, wherein a guide nucleic acid sequence of the pool of guide nucleic acids has a sequence selected from a group of tiled guide nucleic acid that correspond to nucleic acid sequence of a target nucleic acid; and assaying for a signal produce by cleavage of at least some nucleic acids of a reporter of a population of nucleic acids of a reporter. Pooling of guide nucleic acids can ensure broad spectrum identification, or broad coverage, of a target species within a single reaction. This can be particularly helpful in diseases or indications, like sepsis, that may be caused by multiple organisms.

[0253] In some embodiments, the spacer sequence is between 10 and 35 nucleotides in length, between 10 and 30 nucleotides in length, between 15 and 30 nucleotides in length, between 10 and 25 nucleotides in length, between 15 and 25 nucleotides in length, between 17 and 30 nucleotides in length, between 17 and 25 nucleotides in length, between 17 and 22 nucleotides in length, or between 17 and 20 nucleotides in length. In preferred embodiments, the spacer sequence between 17 and 25 nucleotides in length. In more preferred embodiments, the spacer sequence is between 17 and 20 nucleotides in length. In most preferred embodiments, the spacer sequence is 17 nucleotides in length.

[0254] In some embodiments, the repeat sequence is between 15 and 40 nucleotides in length, between 15 and 36 nucleotides in length, between 18 and 36 nucleotides in length, between 18 and 30 nucleotides in length, between 18 and 25 nucleotides in length, between 18 and 22 nucleotides in length, between 18 and 20 nucleotides in length. In preferred embodiments, the repeat sequence is between 20 and 22 nucleotides in length. In more preferred embodiments, the repeat sequence is 20 nucleotides in length.

[0255] The spacer region of guide nucleic acids for CasΦ polypeptides disclosed herein comprise a seed region. In some embodiments, the seed regions do not tolerate mismatches in the complementarity of a spacer and a target sequence within about 1 to about 20 nucleotides from the 5′ end of a spacer sequence. The seed region starts from the 5′ end of the spacer sequence and is a region in which mismatches in the complementarity between the spacer sequence and the target sequence are not tolerated when the guide nucleic acid is bound to a CasΦ polypeptide such that the guide nucleic acid does not hybridize to the target sequence to allow cleavage of the target nucleic acid by the CasΦ polypeptide. In some embodiments, the seed region comprises between 10 and 20 nucleosides, between 12 and 20 nucleosides, between 14 and 20 nucleosides, between 14 and 18 nucleosides, between 10 and 16 nucleosides, between 12 and 16 nucleosides, or between 14 and 16 nucleosides. In preferred embodiments, the seed region comprises 16 nucleotides.

[0256] A programmable nuclease of the present disclosure may be activated to exhibit cleavage activity (e.g., cis-cleavage of a target nucleic acid or trans-cleavage of a collateral nucleic acid) upon binding of a ribonucleoprotein (RNP) complex to a target nucleic acid, in which the spacer of the crRNA of the gRNA hybridizes to the target nucleic acid.

TABLE A
spacer sequences of gRNAs targeting
human TRAC in T cells

| | Spacer sequence | | SEQ |
|---|---|---|---|
| | (5′ --> 3′), | | ID. |
| Name | shown as DNA | Target | NO. |
| R3040 | TGGATATCTGTGGGACAAGA | TRAC | 118 |
| R3041 | TCCCACAGATATCCAGAACC | TRAC | 119 |
| R3042 | GAGTCTCTCAGCTGGTACAC | TRAC | 120 |
| R3043 | AGAGTCTCTCAGCTGGTACA | TRAC | 121 |
| R3044 | TCACTGGATTTAGAGTCTCT | TRAC | 122 |
| R3045 | AGAATCAAAATCGGTGAATA | TRAC | 123 |
| R3046 | GAGAATCAAAATCGGTGAAT | TRAC | 124 |
| R3047 | ACCGATTTTGATTCTCAAAC | TRAC | 125 |
| R3048 | TTTGAGAATCAAAATCGGTG | TRAC | 126 |
| R3049 | GTTTGAGAATCAAAATCGGT | TRAC | 127 |
| R3050 | TGATTCTCAAACAAATGTGT | TRAC | 128 |
| R3051 | GATTCTCAAACAAATGTGTC | TRAC | 129 |
| R3052 | ATTCTCAAACAAATGTGTCA | TRAC | 130 |
| R3053 | TGACACATTTGTTTGAGAAT | TRAC | 131 |
| R3054 | TCAAACAAATGTGTCACAAA | TRAC | 132 |
| R3055 | GTGACACATTTGTTTGAGAA | TRAC | 133 |
| R3056 | CTTTGTGACACATTTGTTTG | TRAC | 134 |
| R3057 | TGATGTGTATATCACAGACA | TRAC | 135 |
| R3058 | TCTGTGATATACACATCAGA | TRAC | 136 |
| R3059 | GTCTGTGATATACACATCAG | TRAC | 137 |
| R3060 | TGTCTGTGATATACACATCA | TRAC | 138 |
| R3061 | AAGTCCATAGACCTCATGTC | TRAC | 139 |
| R3062 | CTCTTGAAGTCCATAGACCT | TRAC | 140 |
| R3063 | AAGAGCAACAGTGCTGTGGC | TRAC | 141 |
| R3064 | CTCCAGGCCACAGCACTGTT | TRAC | 142 |
| R3065 | TTGCTCCAGGCCACAGCACT | TRAC | 143 |
| R3066 | GTTGCTCCAGGCCACAGCAC | TRAC | 144 |
| R3067 | CACATGCAAAGTCAGATTTG | TRAC | 145 |
| R3068 | GCACATGCAAAGTCAGATTT | TRAC | 146 |
| R3069 | GCATGTGCAAACGCCTTCAA | TRAC | 147 |
| R3070 | AAGGCGTTTGCACATGCAAA | TRAC | 148 |
| R3071 | CATGTGCAAACGCCTTCAAC | TRAC | 149 |
| R3072 | TTGAAGGCGTTTGCACATGC | TRAC | 150 |
| R3073 | AACAACAGCATTATTCCAGA | TRAC | 151 |
| R3074 | TGGAATAATGCTGTTGTTGA | TRAC | 152 |
| R3075 | TTCCAGAAGACACCTTCTTC | TRAC | 153 |
| R3076 | CAGAAGACACCTTCTTCCCC | TRAC | 154 |
| R3077 | CCTGGGCTGGGGAAGAAGGT | TRAC | 155 |
| R3078 | TTCCCCAGCCCAGGTAAGGG | TRAC | 156 |
| R3079 | CCCAGCCCAGGTAAGGGCAG | TRAC | 157 |
| R3080 | TAAAAGGAAAAACAGACATT | TRAC | 158 |
| R3081 | CTAAAAGGAAAAACAGACAT | TRAC | 159 |
| R3082 | TTCCTTTTAGAAAGTTCCTG | TRAC | 160 |
| R3083 | TCCTTTTAGAAAGTTCCTGT | TRAC | 161 |
| R3084 | CCTTTTAGAAAGTTCCTGTG | TRAC | 162 |
| R3085 | CTTTTAGAAAGTTCCTGTGA | TRAC | 163 |
| R3086 | TAGAAAGTTCCTGTGATGTC | TRAC | 164 |
| R3136 | AGAAAGTTCCTGTGATGTCA | TRAC | 165 |
| R3137 | GAAAGTTCCTGTGATGTCAA | TRAC | 166 |
| R3138 | ACATCACAGGAACTTTCTAA | TRAC | 167 |
| R3139 | CTGTGATGTCAAGCTGGTCG | TRAC | 168 |
| R3140 | TCGACCAGCTTGACATCACA | TRAC | 169 |
| R3141 | CTCGACCAGCTTGACATCAC | TRAC | 170 |
| R3142 | TCTCGACCAGCTTGACATCA | TRAC | 171 |
| R3143 | AAAGCTTTTCTCGACCAGCT | TRAC | 172 |
| R3144 | CAAAGCTTTTCTCGACCAGC | TRAC | 173 |
| R3145 | CCTGTTTCAAAGCTTTTCTC | TRAC | 174 |
| R3146 | GAAACAGGTAAGACAGGGGT | TRAC | 175 |
| R3147 | AAACAGGTAAGACAGGGGTC | TRAC | 176 |

TABLE B
spacer sequences of gRNAs targeting
human B2M in T cells

| | Spacer Sequence | | SEQ |
|---|---|---|---|
| | (5′ --> 3′), | | ID. |
| Name | shown as DNA | Target | NO. |
| R3087 | AATATAAGTGGAGGCGTCGC | B2M | 177 |
| R3088 | ATATAAGTGGAGGCGTCGCG | B2M | 178 |
| R3089 | AGGAATGCCCGCCAGCGCGA | B2M | 179 |
| R3090 | CTGAAGCTGACAGCATTCGG | B2M | 180 |
| R3091 | GGGCCGAGATGTCTCGCTCC | B2M | 181 |
| R3092 | GCTGTGCTCGCGCTACTCTC | B2M | 182 |
| R3093 | CTGGCCTGGAGGCTATCCAG | B2M | 183 |
| R3094 | TGGCCTGGAGGCTATCCAGC | B2M | 184 |
| R3095 | ATGTGTCTTTTCCCGATATT | B2M | 185 |
| R3096 | TCCCGATATTCCTCAGGTAC | B2M | 186 |
| R3097 | CCCGATATTCCTCAGGTACT | B2M | 187 |
| R3098 | CCGATATTCCTCAGGTACTC | B2M | 188 |
| R3099 | GAGTACCTGAGGAATATCGG | B2M | 189 |
| R3100 | GGAGTACCTGAGGAATATCG | B2M | 190 |
| R3101 | CTCAGGTACTCCAAAGATTC | B2M | 191 |
| R3102 | AGGTTTACTCACGTCATCCA | B2M | 192 |
| R3103 | ACTCACGTCATCCAGCAGAG | B2M | 193 |
| R3104 | CTCACGTCATCCAGCAGAGA | B2M | 194 |
| R3105 | TCTGCTGGATGACGTGAGTA | B2M | 195 |
| R3106 | CATTCTCTGCTGGATGACGT | B2M | 196 |
| R3107 | CCATTCTCTGCTGGATGACG | B2M | 197 |
| R3108 | ACTTTCCATTCTCTGCTGGA | B2M | 198 |
| R3109 | GACTTTCCATTCTCTGCTGG | B2M | 199 |
| R3110 | AGGAAATTTGACTTTCCATT | B2M | 200 |
| R3111 | CCTGAATTGCTATGTGTCTG | B2M | 201 |
| R3112 | CTGAATTGCTATGTGTCTGG | B2M | 202 |
| R3113 | CTATGTGTCTGGGTTTCATC | B2M | 203 |
| R3114 | AATGTCGGATGGATGAAACC | B2M | 204 |
| R3115 | CATCCATCCGACATTGAAGT | B2M | 205 |
| R3116 | ATCCATCCGACATTGAAGTT | B2M | 206 |
| R3117 | AGTAAGTCAACTTCAATGTC | B2M | 207 |
| R3118 | TTCAGTAAGTCAACTTCAAT | B2M | 208 |
| R3119 | AAGTTGACTTACTGAAGAAT | B2M | 209 |
| R3120 | ACTTACTGAAGAATGGAGAG | B2M | 210 |
| R3121 | TCTCTCCATTCTTCAGTAAG | B2M | 211 |
| R3122 | CTGAAGAATGGAGAGAGAAT | B2M | 212 |
| R3123 | AATTCTCTCTCCATTCTTCA | B2M | 213 |
| R3124 | CAATTCTCTCTCCATTCTTC | B2M | 214 |
| R3125 | TCAATTCTCTCTCCATTCTT | B2M | 215 |
| R3126 | TTCAATTCTCTCTCCATTCT | B2M | 216 |
| R3127 | AAAAAGTGGAGCATTCAGAC | B2M | 217 |
| R3128 | CTGAAAGACAAGTCTGAATG | B2M | 218 |
| R3129 | AGACTTGTCTTTCAGCAAGG | B2M | 219 |
| R3130 | TCTTTCAGCAAGGACTGGTC | B2M | 220 |
| R3131 | CAGCAAGGACTGGTCTTTCT | B2M | 221 |
| R3132 | AGCAAGGACTGGTCTTTCTA | B2M | 222 |
| R3133 | CTATCTCTTGTACTACACTG | B2M | 223 |
| R3134 | TATCTCTTGTACTACACTGA | B2M | 224 |
| R3135 | AGTGTAGTACAAGAGATAGA | B2M | 225 |
| R3148 | TACTACACTGAATTCACCCC | B2M | 226 |
| R3149 | AGTGGGGGTGAATTCAGTGT | B2M | 227 |
| R3150 | CAGTGGGGGTGAATTCAGTG | B2M | 228 |
| R3151 | TCAGTGGGGGTGAATTCAGT | B2M | 229 |
| R3152 | TTCAGTGGGGGTGAATTCAG | B2M | 230 |
| R3153 | ACCCCCACTGAAAAAGATGA | B2M | 231 |
| R3154 | ACACGGCAGGCATACTCATC | B2M | 232 |
| R3155 | GGCTGTGACAAAGTCACATG | B2M | 233 |
| R3156 | GTCACAGCCCAAGATAGTTA | B2M | 234 |
| R3157 | TCACAGCCCAAGATAGTTAA | B2M | 235 |
| R3158 | ACTATCTTGGGCTGTGACAA | B2M | 236 |
| R3159 | CCCCACTTAACTATCTTGGG | B2M | 237 |

TABLE C
spacer sequences of gRNAs that
target human PD1 in T cells

| | | | SEQ |
|---|---|---|---|
| | Spacer sequence | | ID. |
| Name | (5′ --> 3′) | Target | NO. |
| R2921 | CCUUCCGCUCACCUCCGCCU | PD1 | 238 |
| R2922 | CCUUCCGCUCACCUCCGCCU | PD1 | 239 |
| R2923 | CGCUCACCUCCGCCUGAGCA | PD1 | 240 |
| R2924 | UCCACUGCUCAGGCGGAGGU | PD1 | 241 |
| R2925 | UAGCACCGCCCAGACGACUG | PD1 | 242 |
| R2926 | AGGCAUGCAGAUCCCACAGG | PD1 | 243 |
| R2927 | CACAGGCGCCCUGGCCAGUC | PD1 | 244 |
| R2928 | UCUGGGCGGUGCUACAACUG | PD1 | 245 |
| R2929 | GCAUGCCUGGAGCAGCCCCA | PD1 | 246 |
| R2930 | UAGCACCGCCCAGACGACUG | PD1 | 247 |
| R2931 | UGGCCGCCAGCCCAGUUGUA | PD1 | 248 |
| R2932 | CUUCCGCUCACCUCCGCCUG | PD1 | 249 |
| R2933 | CAGGGCCUGUCUGGGGAGUC | PD1 | 250 |
| R2934 | UCCCCAGCCCUGCUCGUGGU | PD1 | 251 |
| R2935 | GGUCACCACGAGCAGGGCUG | PD1 | 252 |
| R2936 | UCCCCUUCGGUCACCACGAG | PD1 | 253 |
| R2937 | GAGAAGCUGCAGGUGAAGGU | PD1 | 254 |
| R2938 | ACCUGCAGCUUCUCCAACAC | PD1 | 255 |
| R2939 | UCCAACACAUCGGAGAGCUU | PD1 | 256 |
| R2940 | GCACGAAGCUCUCCGAUGUG | PD1 | 257 |
| R2941 | AGCACGAAGCUCUCCGAUGU | PD1 | 258 |
| R2942 | GUGCUAAACUGGUACCGCAU | PD1 | 259 |
| R2943 | CUGGGGCUCAUGCGGUACCA | PD1 | 260 |
| R2944 | UCCGUCUGGUUGCUGGGGCU | PD1 | 261 |
| R2945 | CCCGAGGACCGCAGCCAGCC | PD1 | 262 |
| R2946 | UGUGACACGGAAGCGGCAGU | PD1 | 263 |
| R2947 | CGUGUCACACAACUGCCCAA | PD1 | 264 |
| R2948 | GGCAGUUGUGUGACACGGAA | PD1 | 265 |
| R2949 | CACAUGAGCGUGGUCAGGGC | PD1 | 266 |
| R2950 | CGCCGGGCCCUGACCACGCU | PD1 | 267 |
| R2951 | GGGGCCAGGGAGAUGGCCCC | PD1 | 268 |
| R2952 | AUCUGCGCCUUGGGGGCCAG | PD1 | 269 |
| R2953 | GAUCUGCGCCUUGGGGGCCA | PD1 | 270 |
| R2954 | CCAGACAGGCCCUGGAACCC | PD1 | 271 |
| R2955 | CCAGCCCUGCUCGUGGUGAC | PD1 | 272 |
| R2956 | UCUCUGGAAGGGCACAAAGG | PD1 | 273 |
| R2957 | GUGCCCUUCCAGAGAGAAGG | PD1 | 274 |
| R2958 | UGCCCUUCCAGAGAGAAGGG | PD1 | 275 |
| R2959 | UGCCCUUCUCUCUGGAAGGG | PD1 | 276 |
| R2960 | CAGAGAGAAGGGCAGAAGUG | PD1 | 277 |
| R2961 | GAACUGGCCGGCUGGCCUGG | PD1 | 278 |
| R2962 | GGAACUGGCCGGCUGGCCUG | PD1 | 279 |
| R2963 | CAAACCCUGGUGGUUGGUGU | PD1 | 280 |
| R2964 | GUGUCGUGGGCGGCCUGCUG | PD1 | 281 |
| R2965 | CCUCGUGCGGCCCGGGAGCA | PD1 | 282 |
| R2966 | UCCCUGCAGAGAAACACACU | PD1 | 283 |
| R2967 | CUCUGCAGGGACAAUAGGAG | PD1 | 284 |
| R2968 | UCUGCAGGGACAAUAGGAGC | PD1 | 285 |
| R2969 | CUCCUCAAAGAAGGAGGACC | PD1 | 286 |
| R2970 | UCCUCAAAGAAGGAGGACCC | PD1 | 287 |
| R2971 | UCUGUGGACUAUGGGGAGCU | PD1 | 288 |
| R2972 | UCUCGCCACUGGAAAUCCAG | PD1 | 289 |
| R2973 | CCAGUGGCGAGAGAAGACCC | PD1 | 290 |
| R2974 | CAGUGGCGAGAGAAGACCCC | PD1 | 291 |
| R2975 | CGCUAGGAAAGACAAUGGUG | PD1 | 292 |
| R2976 | UCUUUCCUAGCGGAAUGGGC | PD1 | 293 |
| R2977 | CCUAGCGGAAUGGGCACCUC | PD1 | 294 |
| R2978 | CUAGCGGAAUGGGCACCUCA | PD1 | 295 |
| R2979 | GCCCCUCUGACCGGCUUCCU | PD1 | 296 |
| R2980 | CUUGGCCACCAGUGUUCUGC | PD1 | 297 |
| R2981 | GCCACCAGUGUUCUGCAGAC | PD1 | 298 |
| R2982 | UGCAGACCCUCCACCAUGAG | PD1 | 299 |
| R2983 | UCCUGAGGAAAUGCGCUGAC | PD1 | 300 |
| R2984 | CCUCAGGAGAAGCAGGCAGG | PD1 | 301 |
| R2985 | CUCAGGAGAAGCAGGCAGGG | PD1 | 302 |
| R2986 | CAGGCCGUCCAGGGGCUGAG | PD1 | 303 |
| R2987 | AGACAUGAGUCCUGUGGUGG | PD1 | 304 |
| R2988 | AGGUCCUGCCAGCACAGAGC | PD1 | 305 |
| R2989 | AGGGAGCUGGACGCAGGCAG | PD1 | 306 |
| R2990 | AGCCCCGGGCCGCAGGCAGC | PD1 | 307 |
| R2991 | AGGCAGGAGGCUCCGGGGCG | PD1 | 308 |
| R2992 | GGGGCUGGUUGGAGAUGGCC | PD1 | 309 |
| R2993 | GAGAUGGCCUUGGAGCAGCC | PD1 | 310 |
| R2994 | GCUGCUCCAAGGCCAUCUCC | PD1 | 311 |
| R2995 | GAGCAGCCAAGGUGCCCCUG | PD1 | 312 |
| R2996 | GGGAUGCCACUGCCAGGGGC | PD1 | 313 |
| R2997 | CGGGAUGCCACUGCCAGGGG | PD1 | 314 |
| R2998 | GGCCCUGCGUCCAGGGCGUU | PD1 | 315 |
| R2999 | UCUGCUCCCUGCAGGCCUAG | PD1 | 316 |
| R3000 | UCUAGGCCUGCAGGGAGCAG | PD1 | 317 |
| R3001 | CCUGAAACUUCUCUAGGCCU | PD1 | 318 |
| R3002 | UGACCUUCCCUGAAACUUCU | PD1 | 319 |
| R3003 | CAGGGAAGGUCAGAAGAGCU | PD1 | 320 |
| R3004 | AGGGAAGGUCAGAAGAGCUC | PD1 | 321 |
| R3005 | CUGCCCUGCCCACCACAGCC | PD1 | 322 |
| R3006 | CCUGCCCUGCCCACCACAGC | PD1 | 323 |
| R3007 | ACACAUGCCCAGGCAGCACC | PD1 | 324 |
| R3008 | CACAUGCCCAGGCAGCACCU | PD1 | 325 |
| R3009 | CCUGCCCCACAAAGGGCCUG | PD1 | 326 |
| R3010 | GUGGGGCAGGGAAGCUGAGG | PD1 | 327 |
| R3011 | UGGGGCAGGGAAGCUGAGGC | PD1 | 328 |
| R3012 | CUGCCUCAGCUUCCCUGCCC | PD1 | 329 |
| R3013 | CAGGCCCAGCCAGCACUCUG | PD1 | 330 |
| R3014 | AGGCCCAGCCAGCACUCUGG | PD1 | 331 |
| R3015 | CACCCCAGCCCCUCACACCA | PD1 | 332 |
| R3016 | GGACCGUAGGAUGUCCCUCU | PD1 | 333 |

TABLE D
spacer sequences of gRNAs targeting
human CIITA

| | Spacer sequence | | SEQ |
|---|---|---|---|
| | (5′ > 3′), | | ID. |
| Name | shown as DNA | Target | NO. |
| R4503 | CTACACAATGCGTTGCCTGG | CIITA | 334 |
| C2TA_T1.1 | | | |
| R4504 | GGGCTCTGACAGGTAGGACC | CIITA | 335 |
| C2TA_T1.2 | | | |
| R4505 | TGTAGGAATCCCAGCCAGGC | CIITA | 336 |
| C2TA_T1.3 | | | |
| R4506 | CCTGGCTCCACGCCCTGCTG | CIITA | 337 |
| C2TA_T1.8 | | | |
| R4507 | GGGAAGCTGAGGGCACGAGG | CIITA | 338 |
| C2TA_T1.9 | | | |
| R4508 | ACAGCGATGCTGACCCCCTG | CIITA | 339 |
| C2TA_T2.1 | | | |
| R4509 | TTAACAGCGATGCTGACCCC | CIITA | 340 |
| C2TA_T2.2 | | | |
| R4510 | TATGACCAGATGGACCTGGC | CIITA | 341 |
| C2TA_T2.3 | | | |
| R4511 | GGGCCCCTAGAAGGTGGCTA | CIITA | 342 |
| C2TA_T2.4 | | | |
| R4512 | TAGGGGCCCCAACTCCATGG | CIITA | 343 |
| C2TA_T2.5 | | | |
| R4513 | AGAAGCTCCAGGTAGCCACC | CIITA | 344 |
| C2TA_T2.6 | | | |
| R4514 | TCCAGCCAGGTCCATCTGGT | CIITA | 345 |
| C2TA_T2.7 | | | |
| R4515 | TTCTCCAGCCAGGTCCATCT | CIITA | 346 |
| C2TA_T2.8 | | | |
| R5200 | AGCAGGCTGTTGTGTGACAT | CIITA | 1934 |
| R5201 | CATGTCACACAACAGCCTGC | CIITA | 1935 |
| R5202 | TGTGACATGGAAGGTGATGA | CIITA | 1936 |
| R5203 | ATCACCTTCCATGTCACACA | CIITA | 1937 |
| R5204 | GCATAAGCCTCCCTGGTCTC | CIITA | 1938 |
| R5205 | CAGGACTCCCAGCTGGAGGG | CIITA | 1939 |
| R5206 | CTCAGGCCCTCCAGCTGGGA | CIITA | 1940 |
| R5207 | TGCTGGCATCTCCATACTCT | CIITA | 1941 |
| R5208 | TGCCCAACTTCTGCTGGCAT | CIITA | 1942 |
| R5209 | CTGCCCAACTTCTGCTGGCA | CIITA | 1943 |
| R5210 | TCTGCCCAACTTCTGCTGGC | CIITA | 1944 |
| R5211 | TGACTTTTCTGCCCAACTTC | CIITA | 1945 |
| R5212 | CTGACTTTTCTGCCCAACTT | CIITA | 1946 |
| R5213 | TCTGACTTTTCTGCCCAACT | CIITA | 1947 |
| R5214 | CCAGAGGAGCTTCCGGCAGA | CIITA | 1948 |
| R5215 | AGGTCTGCCGGAAGCTCCTC | CIITA | 1949 |
| R5216 | CGGCAGACCTGAAGCACTGG | CIITA | 1950 |
| R5217 | CAGTGCTTCAGGTCTGCCGG | CIITA | 1951 |
| R5218 | AACAGCGCAGGCAGTGGCAG | CIITA | 1952 |
| R5219 | AACCAGGAGCCAGCCTCCGG | CIITA | 1953 |
| R5220 | TCCAGGCGCATCTGGCCGGA | CIITA | 1954 |
| R5221 | CTCCAGGCGCATCTGGCCGG | CIITA | 1955 |
| R5222 | TCTCCAGGCGCATCTGGCCG | CIITA | 1956 |
| R5223 | CTCCAGTTCCTCGTTGAGCT | CIITA | 1957 |
| R5224 | TCCAGTTCCTCGTTGAGCTG | CIITA | 1958 |
| R5225 | AGGCAGCTCAACGAGGAACT | CIITA | 1959 |
| R5226 | CTCGTTGAGCTGCCTGAATC | CIITA | 1960 |
| R5227 | AGCTGCCTGAATCTCCCTGA | CIITA | 1961 |
| R5228 | GTCCCCACCATCTCCACTCT | CIITA | 1962 |
| R5229 | TCCCCACCATCTCCACTCTG | CIITA | 1963 |
| R5230 | CCAGAGCCCATGGGGCAGAG | CIITA | 1964 |
| R5231 | GCCAGAGCCCATGGGGCAGA | CIITA | 1965 |
| R5232 | CAGCCTCAGAGATTTGCCAG | CIITA | 1966 |
| R5233 | GGAGGCCGTGGACAGTGAAT | CIITA | 1967 |
| R5234 | ACTGTCCACGGCCTCCCAAC | CIITA | 1968 |
| R5235 | GCTCCATCAGCCACTGACCT | CIITA | 1969 |
| R5236 | AGGCATGCTGGGCAGGTCAG | CIITA | 1970 |
| R5237 | CTCGGGAGGTCAGGGCAGGT | CIITA | 1971 |
| R5238 | GCTCGGGAGGTCAGGGCAGG | CIITA | 1972 |
| R5239 | GAGACCTCTCCAGCTGCCGG | CIITA | 1973 |
| R5240 | TTGGAGACCTCTCCAGCTGC | CIITA | 1974 |
| R5241 | GAAGCTTGTTGGAGACCTCT | CIITA | 1975 |
| R5242 | GGAAGCTTGTTGGAGACCTC | CIITA | 1976 |
| R5243 | TGGAAGCTTGTTGGAGACCT | CIITA | 1977 |
| R5244 | TACCGCTCACTGCAGGACAC | CIITA | 1978 |
| R5245 | CTGCTGCTCCTCTCCAGCCT | CIITA | 1979 |
| R5246 | CCGCTCCAGGCTCTTGCTGC | CIITA | 1980 |
| R5247 | TGCCCAGTCCGGGGTGGCCA | CIITA | 1981 |
| R5248 | GGCCAGCTGCCGTTCTGCCC | CIITA | 1982 |
| R5249 | GCAGCCAACAGCACCTCAGC | CIITA | 1983 |
| R5250 | GCTGCCAAGGAGCACCGGCG | CIITA | 1984 |
| R5251 | CCCAGCACAGCAATCACTCG | CIITA | 1985 |
| R5252 | GCCCAGCACAGCAATCACTC | CIITA | 1986 |
| R5253 | CTGTGCTGGGCAAAGCTGGT | CIITA | 1987 |
| R5254 | CCCTGACCAGCTTTGCCCAG | CIITA | 1988 |
| R5255 | GGCTGGGGCAGTGAGCCGGG | CIITA | 1989 |
| R5256 | TGGCCGGCTTCCCCAGTACG | CIITA | 1990 |
| R5257 | CCCAGTACGACTTTGTCTTC | CIITA | 1991 |
| R5258 | GTCTTCTCTGTCCCCTGCCA | CIITA | 1992 |
| R5259 | TCTTCTCTGTCCCCTGCCAT | CIITA | 1993 |
| R5260 | TCTGTCCCCTGCCATTGCTT | CIITA | 1994 |
| R5261 | AAGCAATGGCAGGGGACAGA | CIITA | 1995 |
| R5262 | CTTGAACCGTCCGGGGGATG | CIITA | 1996 |
| R5263 | AACCGTCCGGGGGATGCCTA | CIITA | 1997 |
| R5264 | TCCCTGGGCCCACAGCCACT | CIITA | 1998 |
| R5265 | AAGATGTGGCTGAAAACCTC | CIITA | 1999 |
| R5266 | TCAGCCACATCTTGAAGAGA | CIITA | 2000 |
| R5267 | CAGCCACATCTTGAAGAGAC | CIITA | 2001 |
| R5268 | AGCCACATCTTGAAGAGACC | CIITA | 2002 |
| R5269 | AAGAGACCTGACCGCGTTCT | CIITA | 2003 |
| R5270 | TGCTCATCCTAGACGGCTTC | CIITA | 2004 |
| R5271 | CAGCTCCTCGAAGCCGTCTA | CIITA | 2005 |
| R5272 | CGCTTCCAGCTCCTCGAAGC | CIITA | 2006 |
| R5273 | GAGGAGCTGGAAGCGCAAGA | CIITA | 2007 |
| R5274 | CTGCACAGCACGTGCGGACC | CIITA | 2008 |
| R5275 | TGGAAAAGGCCGGCCAGCAG | CIITA | 2009 |
| R5276 | TTCTGGAAAAGGCCGGCCAG | CIITA | 2010 |
| R5277 | TCCAGAAGAAGCTGCTCCGA | CIITA | 2011 |
| R5278 | CCAGAAGAAGCTGCTCCGAG | CIITA | 2012 |
| R5279 | CAGAAGAAGCTGCTCCGAGG | CIITA | 2013 |
| R5280 | CACCCTCCTCCTCACAGCCC | CIITA | 2014 |
| R5281 | CTCAGGCTCTGGACCAGGCG | CIITA | 2015 |
| R5282 | GAGCTGTCCGGCTTCTCCAT | CIITA | 2016 |
| R5283 | AGCTGTCCGGCTTCTCCATG | CIITA | 2017 |
| R5284 | TCCATGGAGCAGGCCCAGGC | CIITA | 2018 |
| R5285 | GAGAGCTCAGGGATGACAGA | CIITA | 2019 |
| R5286 | AGAGCTCAGGGATGACAGAG | CIITA | 2020 |
| R5287 | GTGCTCTGTCATCCCTGAGC | CIITA | 2021 |
| R5288 | TTCTCAGTCACAGCCACAGC | CIITA | 2022 |
| R5289 | TCAGTCACAGCCACAGCCCT | CIITA | 2023 |
| R5290 | GTGCCGGGCAGTGTGCCAGC | CIITA | 2024 |
| R5291 | TGCCGGGCAGTGTGCCAGCT | CIITA | 2025 |
| R5292 | GCGTCCTCCCCAAGCTCCAG | CIITA | 2026 |
| R5293 | GGGAGGACGCCAAGCTGCCC | CIITA | 2027 |
| R5294 | GCCAGCTCTGCCAGGGCCCC | CIITA | 2028 |
| R5295 | ATGTCTGCGGCCCAGCTCCC | CIITA | 2029 |
| R5392 | GATGTCTGCGGCCCAGCTCC | CIITA | 2030 |
| R5393 | CCATCCGCAGACGTGAGGAC | CIITA | 2031 |
| R5394 | GCCATCGCCCAGGTCCTCAC | CIITA | 2032 |
| R5395 | GGCCATCGCCCAGGTCCTCA | CIITA | 2033 |
| R5396 | GACTAAGCCTTTGGCCATCG | CIITA | 2034 |
| R5397 | GTCCAACACCCACCGCGGGC | CIITA | 2035 |
| R5398 | CAGGAGGAAGCTGGGGAAGG | CIITA | 2036 |
| R5399 | CCCAGCTTCCTCCTGCAATG | CIITA | 2037 |
| R5400 | CTCCTGCAATGCTTCCTGGG | CIITA | 2038 |
| R5401 | CTGGGGGCCCTGTGGCTGGC | CIITA | 2039 |
| R5402 | GCCACTCAGAGCCAGCCACA | CIITA | 2040 |
| R5403 | CGCCACTCAGAGCCAGCCAC | CIITA | 2041 |
| R5404 | ATTTCGCCACTCAGAGCCAG | CIITA | 2042 |
| R5405 | TCCTTGATTTCGCCACTCAG | CIITA | 2043 |
| R5406 | GGGTCAATGCTAGGTACTGC | CIITA | 2044 |
| R5407 | CTTGGGGTCAATGCTAGGTA | CIITA | 2045 |
| R5408 | TTCCTTGGGGTCAATGCTAG | CIITA | 2046 |
| R5409 | ACCCCAAGGAAGAAGAGGCC | CIITA | 2047 |
| R5410 | TCATAGGGCCTCTTCTTCCT | CIITA | 2048 |
| R5411 | CTGGCTGGGCTGATCTTCCA | CIITA | 2049 |
| R5412 | TGGCTGGGCTGATCTTCCAG | CIITA | 2050 |
| R5413 | CAGCCTCCCGCCCGCTGCCT | CIITA | 2051 |
| R5414 | CTGTCCACCGAGGCAGCCGC | CIITA | 2052 |
| R5415 | TGCTTCCTGTCCACCGAGGC | CIITA | 2053 |
| R5416 | AGGTACCTCGCAAGCACCTT | CIITA | 2054 |
| R5417 | CGAGGTACCTGAAGCGGCTG | CIITA | 2055 |
| R5418 | CAGCCTCCTCGGCCTCGTGG | CIITA | 2056 |
| R5419 | GGCAGCACGTGGTACAGGAG | CIITA | 2057 |
| R5420 | GCAGCACGTGGTACAGGAGC | CIITA | 2058 |
| R5421 | TCTGGGCACCCGCCTCACGC | CIITA | 2059 |
| R5422 | CTGGGCACCCGCCTCACGCC | CIITA | 2060 |
| R5423 | TGGGCACCCGCCTCACGCCT | CIITA | 2061 |
| R5424 | CCCAGTACATGTGCATCAGG | CIITA | 2062 |
| R5425 | GCCCGCCGCCTCCAAGGCCT | CIITA | 2063 |
| R5426 | GAGGCGGCGGGCCAAGACTT | CIITA | 2064 |
| R5427 | TCCCTGGACCTCCGCAGCAC | CIITA | 2065 |
| R5428 | GCCCCTCTGGATTGGGGAGC | CIITA | 2066 |
| R5429 | CCCCTCTGGATTGGGGAGCC | CIITA | 2067 |
| R5430 | GGGAGCCTCGTGGGACTCAG | CIITA | 2068 |
| R5431 | GTCTCCCCATGCTGCTGCAG | CIITA | 2069 |
| R5432 | TCCTCTGCTGCCTGAAGTAG | CIITA | 2070 |
| R5433 | AGGCAGCAGAGGAGAAGTTC | CIITA | 2071 |
| R5434 | AAAGGCTCGATGGTGAACTT | CIITA | 2072 |
| R5435 | GAAAGGCTCGATGGTGAACT | CIITA | 2073 |
| R5436 | ACCATCGAGCCTTTCAAAGC | CIITA | 2074 |
| R5437 | GCTTTGAAAGGCTCGATGGT | CIITA | 2075 |
| R5438 | AGGGACTTGGCTTTGAAAGG | CIITA | 2076 |
| R5439 | CAAAGCCAAGTCCCTGAAGG | CIITA | 2077 |
| R5440 | AAAGCCAAGTCCCTGAAGGA | CIITA | 2078 |
| R5441 | CACATCCTTCAGGGACTTGG | CIITA | 2079 |
| R5442 | CCAGGTCTTCCACATCCTTC | CIITA | 2080 |
| R5443 | CCCAGGTCTTCCACATCCTT | CIITA | 2081 |
| R5444 | CTCGGAAGACACAGCTGGGG | CIITA | 2082 |
| R5445 | GGTCCCGAACAGCAGGGAGC | CIITA | 2083 |
| R5446 | AGGTCCCGAACAGCAGGGAG | CIITA | 2084 |
| R5447 | TTTAGGTCCCGAACAGCAGG | CIITA | 2085 |
| R5448 | CTTTAGGTCCCGAACAGCAG | CIITA | 2086 |
| R5449 | GGGACCTAAAGAAACTGGAG | CIITA | 2087 |
| R5450 | GGGAAAGCCTGGGGGCCTGA | CIITA | 2088 |
| R5451 | GGGGAAAGCCTGGGGGCCTG | CIITA | 2089 |
| R5452 | CCCCAAACTGGTGCGGATCC | CIITA | 2090 |
| R5453 | CCCAAACTGGTGCGGATCCT | CIITA | 2091 |
| R5454 | TTCTCACTCAGCGCATCCAG | CIITA | 2092 |
| R5455 | AGCTGGGGGAAGGTGGCTGA | CIITA | 2093 |
| R5456 | CCCCAGCTGAAGTCCTTGGA | CIITA | 2094 |
| R5457 | CAAGGACTTCAGCTGGGGGA | CIITA | 2095 |
| R5458 | CCAAGGACTTCAGCTGGGGG | CIITA | 2096 |
| R5459 | AGGGTTTCCAAGGACTTCAG | CIITA | 2097 |
| R5460 | TAGGCACCCAGGTCAGTGAT | CIITA | 2098 |
| R5461 | GTAGGCACCCAGGTCAGTGA | CIITA | 2099 |
| R5462 | GCTCGCTGCATCCCTGCTCA | CIITA | 2100 |
| R5463 | GCCTGAGCAGGGATGCAGCG | CIITA | 2101 |
| R5464 | TACAATAACTGCATCTGCGA | CIITA | 2102 |
| R5465 | GCTCGTGTGCTTCCGGACAT | CIITA | 2103 |
| R5466 | CGGACATGGTGTCCCTCCGG | CIITA | 2104 |
| R5467 | ACGGCTGCCGGGGCCCAGCA | CIITA | 2105 |
| R5468 | GGAGGTGTCCTCATGTGGAG | CIITA | 2106 |
| R5469 | CTGGACACTGAATGGGATGG | CIITA | 2107 |
| R5470 | AGTGTCCAGGAACACCTGCA | CIITA | 2108 |
| R5471 | CAGGTGTTCCTGGACACTGA | CIITA | 2109 |
| R5472 | TTGCAGGTGTTCCTGGACAC | CIITA | 2110 |
| R5473 | ACGGATCAGCCTGAGATGAT | CIITA | 2111 |

TABLE E
spacer sequences of gRNAs targeting mouse PCSK9

| | | | SEQ |
|---|---|---|---|
| | Spacer sequence | | ID. |
| Name | (5′ --> 3′) | Target | NO. |
| R4238 | CCGCUGUUGCCGCCGCUGCU | PCSK9 | 347 |
| R4239 | CCGCCGCUGCUGCUGCUGUU | PCSK9 | 348 |
| R4240 | CUGCUACUGUGCCCCACCGG | PCSK9 | 349 |
| R4241 | AUAAUCUCCAUCCUCGUCCU | PCSK9 | 350 |
| R4242 | UGAAGAGCUGAUGCUCGCCC | PCSK9 | 351 |
| R4243 | GAGCAACGGCGGAAGGUGGC | PCSK9 | 352 |
| R4244 | CUGGCAGCCUCCAGGCCUCC | PCSK9 | 353 |
| R4245 | UGGUGCUGAUGGAGGAGACC | PCSK9 | 354 |
| R4246 | AAUCUGUAGCCUCUGGGUCU | PCSK9 | 355 |
| R4247 | UUCAAUCUGUAGCCUCUGGG | PCSK9 | 356 |
| R4248 | GUUCAAUCUGUAGCCUCUGG | PCSK9 | 357 |
| R4249 | AACAAACUGCCCACCGCCUG | PCSK9 | 358 |
| R4250 | AUGACAUAGCCCCGGCGGGC | PCSK9 | 359 |
| R4251 | UACAUAUCUUUUAUGACCUC | PCSK9 | 360 |
| R4252 | UAUGACCUCUUCCCUGGCUU | PCSK9 | 361 |
| R4253 | AUGACCUCUUCCCUGGCUUC | PCSK9 | 362 |
| R4254 | UGACCUCUUCCCUGGCUUCU | PCSK9 | 363 |
| R4255 | ACCAAGAAGCCAGGGAAGAG | PCSK9 | 364 |
| R4256 | CCUGGCUUCUUGGUGAAGAU | PCSK9 | 365 |
| R4257 | UUGGUGAAGAUGAGCAGUGA | PCSK9 | 366 |
| R4258 | GUGAAGAUGAGCAGUGACCU | PCSK9 | 367 |
| R4259 | CCCCAUGUGGAGUACAUUGA | PCSK9 | 368 |
| R4260 | CUCAAUGUACUCCACAUGGG | PCSK9 | 369 |
| R4261 | AGGAAGACUCCUUUGUCUUC | PCSK9 | 370 |
| R4262 | GUCUUCGCCCAGAGCAUCCC | PCSK9 | 371 |
| R4263 | UCUUCGCCCAGAGCAUCCCA | PCSK9 | 372 |
| R4264 | GCCCAGAGCAUCCCAUGGAA | PCSK9 | 373 |
| R4265 | CAUGGGAUGCUCUGGGCGAA | PCSK9 | 374 |
| R4266 | GCUCCAGGUUCCAUGGGAUG | PCSK9 | 375 |
| R4267 | UCCCAGCAUGGCACCAGACA | PCSK9 | 376 |
| R4268 | CUCUGUCUGGUGCCAUGCUG | PCSK9 | 377 |
| R4269 | GAUACCAGCAUCCAGGGUGC | PCSK9 | 378 |
| R4270 | AGGGCAGGGUCACCAUCACC | PCSK9 | 379 |
| R4271 | AAGUCGGUGAUGGUGACCCU | PCSK9 | 380 |
| R4272 | AACAGCGUGCCGGAGGAGGA | PCSK9 | 381 |
| R4273 | GCCACACCAGCAUCCCGGCC | PCSK9 | 382 |
| R4274 | AGCACACGCAGGCUGUGCAG | PCSK9 | 383 |
| R4275 | ACAGUUGAGCACACGCAGGC | PCSK9 | 384 |
| R4276 | CCUUGACAGUUGAGCACACG | PCSK9 | 385 |
| R4277 | GCUGACUCUUCCGAAUAAAC | PCSK9 | 386 |
| R4278 | AUUCGGAAGAGUCAGCUAAU | PCSK9 | 387 |
| R4279 | UUCGGAAGAGUCAGCUAAUC | PCSK9 | 388 |
| R4280 | GGAAGAGUCAGCUAAUCCAG | PCSK9 | 389 |
| R4281 | UGCUGCCCCUGGCCGGUGGG | PCSK9 | 390 |
| R4282 | AGGAUGCGGCUAUACCCACC | PCSK9 | 391 |
| R4283 | CCAGCUGCUGCAACCAGCAC | PCSK9 | 392 |
| R4284 | CAGCAGCUGGGAACUUCCGG | PCSK9 | 393 |
| R4285 | CGGGACGACGCCUGCCUCUA | PCSK9 | 394 |
| R4286 | GUGGCCCCGACUGUGAUGAC | PCSK9 | 395 |
| R4287 | CCUUGGGGACUUUGGGGACU | PCSK9 | 396 |
| R4288 | GUCCCCAAAGUCCCCAAGGU | PCSK9 | 397 |
| R4289 | GGGACUUUGGGGACUAAUUU | PCSK9 | 398 |
| R4290 | GGGGACUAAUUUUGGACGCU | PCSK9 | 399 |
| R4291 | GGGACUAAUUUUGGACGCUG | PCSK9 | 400 |
| R4292 | UGGACGCUGUGUGGAUCUCU | PCSK9 | 401 |
| R4293 | GGACGCUGUGUGGAUCUCUU | PCSK9 | 402 |
| R4294 | GACGCUGUGUGGAUCUCUUU | PCSK9 | 403 |
| R4295 | CCGGGGGCAAAGAGAUCCAC | PCSK9 | 404 |
| R4296 | GCCCCCGGGAAGGACAUCAU | PCSK9 | 405 |
| R4297 | CCCCCGGGAAGGACAUCAUC | PCSK9 | 406 |
| R4298 | AUGUCACAGAGUGGGACCUC | PCSK9 | 407 |
| R4299 | UGGCUCGGAUGCUGAGCCGG | PCSK9 | 408 |
| R4300 | CCCUGGCCGAGCUGCGGCAG | PCSK9 | 409 |
| R4301 | GUAGAGAAGUGGAUCAGCCU | PCSK9 | 410 |
| R4302 | GGUAGAGAAGUGGAUCAGCC | PCSK9 | 411 |
| R4303 | UCUACCAAAGACGUCAUCAA | PCSK9 | 412 |
| R4304 | AUGACGUCUUUGGUAGAGAA | PCSK9 | 413 |
| R4305 | CCUGAGGACCAGCAGGUGCU | PCSK9 | 414 |
| R4306 | GGGGUCAGCACCUGCUGGUC | PCSK9 | 415 |
| R4307 | GAGUGGGCCCCGAGUGUGCC | PCSK9 | 416 |
| R4308 | UGGGGCACAGCGGGCUGUAG | PCSK9 | 417 |
| R4309 | UCCAGGAGCGGGAGGCGUCG | PCSK9 | 418 |
| R4310 | CAGACCUGCUGGCCUCCUAU | PCSK9 | 419 |
| R4311 | AGGGCCUUGCAGACCUGCUG | PCSK9 | 420 |
| R4312 | GGGGGUGAGGGUGUCUAUGC | PCSK9 | 421 |
| R4313 | GGGGUGAGGGUGUCUAUGCC | PCSK9 | 422 |
| R4314 | GCACGGGGAACCAGGCAGCA | PCSK9 | 423 |
| R4315 | CCCGUGCCAACUGCAGCAUC | PCSK9 | 424 |
| R4316 | UGGAUGCUGCAGUUGGCACG | PCSK9 | 425 |
| R4317 | UGGUGGCAGUGGACAUGGGU | PCSK9 | 426 |
| R4318 | CACUUCCCAAUGGAAGCUGC | PCSK9 | 427 |
| R4319 | CAUUGGGAAGUGGAAGACCU | PCSK9 | 428 |
| R4320 | GGAAGUGGAAGACCUUAGUG | PCSK9 | 429 |
| R4321 | GUGUCCGGAGGCAGCCUGCG | PCSK9 | 430 |
| R4322 | GCCACCAGGCGGCCAGUGUC | PCSK9 | 431 |
| R4323 | CUGCUGCCAUGCCCCAGGGC | PCSK9 | 432 |
| R4324 | CAGCCCUGGGGCAUGGCAGC | PCSK9 | 433 |
| R4325 | CAUUCCAGCCCUGGGGCAUG | PCSK9 | 434 |
| R4326 | GCAUUCCAGCCCUGGGGCAU | PCSK9 | 435 |
| R4327 | UGCAUUCCAGCCCUGGGGCA | PCSK9 | 436 |
| R4328 | AUUUUGCAUUCCAGCCCUGG | PCSK9 | 437 |
| R4329 | CAUCCAGUCAGGGUCCAUCC | PCSK9 | 438 |
| R4330 | UCCACGCUGUAGGCUCCCAG | PCSK9 | 439 |
| R4331 | CCACACACAGGUUGUCCACG | PCSK9 | 440 |
| R4332 | UCCACUGGUCCUGUCUGCUC | PCSK9 | 441 |
| R4333 | CUGAAGGCCGGCUCCGGCAG | PCSK9 | 442 |

TABLE F
spacer sequences of gRNAs
targets Bak1 in CHO cells

| | Spacer sequence | SEQ |
|---|---|---|
| | (5′ --> 3′), | ID |
| Name | shown as DNA | NO |
| R2452_Bak1_CasPhi_1 | GAAGCTATGTTTTCCATCTC | 443 |
| R2453_Bak1_CasPhi_2 | GCAGGGGCAGCCGCCCCCTG | 444 |
| R2454_Bak1_CasPhi_3 | CTCCTAGAACCCAACAGGTA | 445 |
| R2455_Bak1_CasPhi_4 | GAAAGACCTCCTCTGTGTCC | 446 |
| R2456_Bak1_CasPhi_5 | TCCATCTCGGGGTTGGCAGG | 447 |
| R2457_Bak1_CasPhi_6 | TTCCTGATGGTGGAGATGGA | 448 |
| R2849_Bak1_nsd_sg1 | CTGACTCCCAGCTCTGACCC | 449 |
| R2850_Bak1_nsd_sg2 | TGGGGTCAGAGCTGGGAGTC | 450 |
| R2851_Bak1_nsd_sg3 | GAAAGACCTCCTCTGTGTCC | 451 |
| R2852_Bak1_nsd_sg4 | CGAAGCTATGTTTTCCATCT | 452 |
| R2853_Bak1_nsd_sg5 | GAAGCTATGTTTTCCATCTC | 453 |
| R2854_Bak1_nsd_sg6 | TCCATCTCCACCATCAGGAA | 454 |
| R2855_Bak1_nsd_sg7 | CCATCTCCACCATCAGGAAC | 455 |
| R2856_Bak1_nsd_sg8 | CTGATGGTGGAGATGGAAAA | 456 |
| R2857_Bak1_nsd_sg9 | CATCTCCACCATCAGGAACA | 457 |
| R2858_Bak1_nsd_sg10 | TTCCTGATGGTGGAGATGGA | 458 |
| R2859_Bak1_nsd_sg11 | GCAGGGGCAGCCGCCCCCTG | 459 |
| R2860_Bak1_nsd_sg12 | TCCATCTCGGGGTTGGCAGG | 460 |
| R2861_Bak1_nsd_sg13 | TAGGAGCAAATTGTCCATCT | 461 |
| R2862_Bak1_nsd_sg14 | GGTTCTAGGAGCAAATTGTC | 462 |
| R2863_Bak1_nsd_sg15 | GCTCCTAGAACCCAACAGGT | 463 |
| R2864_Bak1_nsd_sg16 | CTCCTAGAACCCAACAGGTA | 464 |
| R3977_Bak1_exon1_sg1 | TCCAGACGCCATCTTTCAGG | 465 |
| R3978_Bak1_exon1_sg2 | TGGTAAGAGTCCTCCTGCCC | 466 |
| R3979_Bak1_exon3_sg1 | TTACAGCATCTTGGGTCAGG | 467 |
| R3980_Bak1_exon3_sg2 | GGTCAGGTGGGCCGGCAGCT | 468 |
| R3981_Bak1_exon3_sg3 | CTATCATTGGAGATGACATT | 469 |
| R3982_Bak1_exon3_sg4 | GAGATGACATTAACCGGAGA | 470 |
| R3983_Bak1_exon3_sg5 | TGGAACTCTGTGTCGTATCT | 471 |
| R3984_Bak1_exon3_sg6 | CAGAATTTACTGGAGCAGCT | 472 |
| R3985_Bak1_exon3_sg7 | ACTGGAGCAGCTGCAGCCCA | 473 |
| R3986_Bak1_exon3_sg8 | CCAGCTGTGGGCTGCAGCTG | 474 |
| R3987_Bak1_exon3_sg9 | GTAGGCATTCCCAGCTGTGG | 475 |
| R3988_Bak1_exon3_sg10 | GTGAAGAGTTCGTAGGCATT | 476 |
| R3989_Bak1_exon3_sg11 | ACCAAGATTGCCTCCAGGTA | 477 |
| R3990_Bak1_exon3_sg12 | CCTCCAGGTACCCACCACCA | 478 |

TABLE G
spacer sequences of gRNAs
targeting Bax in CHO cells

| | Spacer sequence | SEQ |
|---|---|---|
| | (5′ --> 3′), | ID |
| Name | shown as DNA | NO |
| R2458_Bax_CasPhi_1 | CTAATGTGGATACTAACTCC | 479 |
| R2459_Bax_CasPhi_2 | TTCCGTGTGGCAGCTGACAT | 480 |
| R2460_Bax_CasPhi_3 | CTGATGGCAACTTCAACTGG | 481 |
| R2461_Bax_CasPhi_4 | TACTTTGCTAGCAAACTGGT | 482 |
| R2462_Bax_CasPhi_5 | AGCACCAGTTTGCTAGCAAA | 483 |
| R2463_Bax_CasPhi_6 | AACTGGGGCCGGGTTGTTGC | 484 |
| R2865_Bax_nsd_sg1 | TTCTCTTTCCTGTAGGATGA | 485 |
| R2866_Bax_nsd_sg2 | TCTTTCCTGTAGGATGATTG | 486 |
| R2867_Bax_nsd_sg3 | CCTGTAGGATGATTGCTAAT | 487 |
| R2868_Bax_nsd_sg4 | CTGTAGGATGATTGCTAATG | 488 |
| R2869_Bax_nsd_sg5 | CTAATGTGGATACTAACTCC | 489 |
| R2870_Bax_nsd_sg6 | TTCCGTGTGGCAGCTGACAT | 490 |
| R2871_Bax_nsd_sg7 | CGTGTGGCAGCTGACATGTT | 491 |
| R2872_Bax_nsd_sg8 | CCATCAGCAAACATGTCAGC | 492 |
| R2873_Bax_nsd_sg9 | AAGTTGCCATCAGCAAACAT | 493 |
| R2874_Bax_nsd_sg10 | GCTGATGGCAACTTCAACTG | 494 |
| R2875_Bax_nsd_sg11 | CTGATGGCAACTTCAACTGG | 495 |
| R2876_Bax_nsd_sg12 | AACTGGGGCCGGGTTGTTGC | 496 |
| R2877_Bax_nsd_sg13 | TTGCCCTTTTCTACTTTGCT | 497 |
| R2878_Bax_nsd_sg14 | CCCTTTTCTACTTTGCTAGC | 498 |
| R2879_Bax_nsd_sg15 | CTAGCAAAGTAGAAAAGGGC | 499 |
| R2880_Bax_nsd_sg16 | GCTAGCAAAGTAGAAAAGGG | 500 |
| R2881_Bax_nsd_sg17 | TCTACTTTGCTAGCAAACTG | 501 |
| R2882_Bax_nsd_sg18 | CTACTTTGCTAGCAAACTGG | 502 |
| R2883_Bax_nsd_sg19 | TACTTTGCTAGCAAACTGGT | 503 |
| R2884_Bax_nsd_sg20 | GCTAGCAAACTGGTGCTCAA | 504 |
| R2885_Bax_nsd_sg21 | CTAGCAAACTGGTGCTCAAG | 505 |
| R2886_Bax_nsd_sg22 | AGCACCAGTTTGCTAGCAAA | 506 |

TABLE H
spacer sequences of gRNAs
targeting Fut8 in CHO cells

| | Spacer sequence | SEQ |
|---|---|---|
| | (5′ --> 3′), | ID |
| Name | shown as DNA | NO |
| R2464_Fut8_CasPhi_1 | CCACTTTGTCAGTGCGTCTG | 507 |
| R2465_Fut8_casPhi_2 | CTCAATGGGATGGAAGGCTG | 508 |
| R2466_Fut8_CasPhi_3 | AGGAATACATGGTACACGTT | 509 |
| R2467_Fut8_CasPhi_4 | AAGAACATTTTCAGCTTCTC | 510 |
| R2468_Fut8_CasPhi_5 | ATCCACTTTCATTCTGCGTT | 511 |
| R2469_Fut8_CasPhi_6 | TTTGTTAAAGGAGGCAAAGA | 512 |
| R2887_Fut8_nsd_sg1 | TCCCCAGAGTCCATGTCAGA | 513 |
| R2888_Fut8_nsd_sg2 | TCAGTGCGTCTGACATGGAC | 514 |
| R2889_Fut8_nsd_sg3 | GTCAGTGCGTCTGACATGGA | 515 |
| R2890_Fut8_nsd_sg4 | CCACTTTGTCAGTGCGTCTG | 516 |
| R2891_Fut8_nsd_sg5 | TGTTCCCACTTTGTCAGTGC | 517 |
| R2892_Fut8_nsd_sg6 | CTCAATGGGATGGAAGGCTG | 518 |
| R2893_Fut8_nsd_sg7 | CATCCCATTGAGGAATACAT | 519 |
| R2894_Fut8_nsd_sg8 | AGGAATACATGGTACACGTT | 520 |
| R2895_Fut8_nsd_sg9 | AACGTGTACCATGTATTCCT | 521 |
| R2896_Fut8_nsd_sg10 | TTCAACGTGTACCATGTATT | 522 |
| R2897_Fut8_nsd_sg11 | AAGAACATTTTCAGCTTCTC | 523 |
| R2898_Fut8_nsd_sg12 | GAGAAGCTGAAAATGTTCTT | 524 |
| R2899_Fut8_nsd_sg13 | TCAGCTTCTCGAACGCAGAA | 525 |
| R2900_Fut8_nsd_sg14 | CAGCTTCTCGAACGCAGAAT | 526 |
| R2901_Fut8_nsd_sg15 | TGCGTTCGAGAAGCTGAAAA | 527 |
| R2902_Fut8_nsd_sg16 | AGCTTCTCGAACGCAGAATG | 528 |
| R2903_Fut8_nsd_sg17 | ATTCTGCGTTCGAGAAGCTG | 529 |
| R2904_Fut8_nsd_sg18 | CATTCTGCGTTCGAGAAGCT | 530 |
| R2905_Fut8_nsd_sg19 | TCGAACGCAGAATGAAAGTG | 531 |
| R2906_Fut8_nsd_sg20 | ATCCACTTTCATTCTGCGTT | 532 |
| R2907_Fut8_nsd_sg21 | TATCCACTTTCATTCTGCGT | 533 |
| R2908_Fut8_nsd_sg22 | TTATCCACTTTCATTCTGCG | 534 |
| R2909_Fut8_nsd_sg23 | TTTATCCACTTTCATTCTGC | 535 |
| R2910_Fut8_nsd_sg24 | TTTTATCCACTTTCATTCTG | 536 |
| R2911_Fut8_nsd_sg25 | AACAAAGAAGGGTCATCAGT | 537 |
| R2912_Fut8_nsd_sg26 | CCTCCTTTAACAAAGAAGGG | 538 |
| R2913_Fut8_nsd_sg27 | GCCTCCTTTAACAAAGAAGG | 539 |
| R2914_Fut8_nsd_sg28 | TTTGTTAAAGGAGGCAAAGA | 540 |
| R2915_Fut8_nsd_sg29 | GTTAAAGGAGGCAAAGACAA | 541 |
| R2916_Fut8_nsd_sg30 | TTAAAGGAGGCAAAGACAAA | 542 |
| R2917_Fut8_nsd_sg31 | TCTTTGCCTCCTTTAACAAA | 543 |
| R2918_Fut8_nsd_sg32 | GTCTTTGCCTCCTTTAACAA | 544 |
| R2919_Fut8_nsd_sg33 | GTCTAACTTACTTTGTCTTT | 545 |
| R2920_Fut8_nsd_sg34 | TTGGTCTAACTTACTTTGTC | 546 |

TABLE 1
CasΦ.12 gRNAs targeting human
TRAC in T cells

| | Spacer sequence | SEQ |
|---|---|---|
| | (5′ --> 3′), | ID |
| Name | shown as DNA | NO |
| R3040_ | CTTTCAAGACTAATAGAT | 547 |
| CasP | TGCTCCTTACGAGGAGAC | |
| hi12 | TGGATATCTGTGGGACAA | |
| | GA | |
| R3041_ | CTTTCAAGACTAATAGAT | 548 |
| CasP | TGCTCCTTACGAGGAGAC | |
| hi12 | TCCCACAGATATCCAGAA | |
| | CC | |
| R3042_ | CTTTCAAGACTAATAGAT | 549 |
| CasP | TGCTCCTTACGAGGAGAC | |
| hi12 | GAGTCTCTCAGCTGGTAC | |
| | AC | |
| R3043_ | CTTTCAAGACTAATAGAT | 550 |
| CasP | TGCTCCTTACGAGGAGAC | |
| hi12 | AGAGTCTCTCAGCTGGTA | |
| | CA | |
| R3044_ | CTTTCAAGACTAATAGAT | 551 |
| CasP | TGCTCCTTACGAGGAGAC | |
| hi12 | TCACTGGATTTAGAGTCT | |
| | CT | |
| R3045_ | CTTTCAAGACTAATAGAT | 552 |
| CasP | TGCTCCTTACGAGGAGAC | |
| hi12 | AGAATCAAAATCGGTGAA | |
| | TA | |
| R3046_ | CTTTCAAGACTAATAGAT | 553 |
| CasP | TGCTCCTTACGAGGAGAC | |
| hi12 | GAGAATCAAAATCGGTGA | |
| | AT | |
| R3047_ | CTTTCAAGACTAATAGAT | 554 |
| CasP | TGCTCCTTACGAGGAGAC | |
| hi12 | ACCGATTTTGATTCTCAA | |
| | AC | |
| R3048_ | CTTTCAAGACTAATAGAT | 555 |
| CasP | TGCTCCTTACGAGGAGAC | |
| hi12 | TTTGAGAATCAAAATCGG | |
| | TG | |
| R3049_ | CTTTCAAGACTAATAGAT | 556 |
| CasP | TGCTCCTTACGAGGAGAC | |
| hi12 | GTTTGAGAATCAAAATCG | |
| | GT | |
| R3050_ | CTTTCAAGACTAATAGAT | 557 |
| CasP | TGCTCCTTACGAGGAGAC | |
| hi12 | TGATTCTCAAACAAATGT | |
| | GT | |
| R3051_ | CTTTCAAGACTAATAGAT | 558 |
| CasP | TGCTCCTTACGAGGAGAC | |
| hi12 | GATTCTCAAACAAATGTG | |
| | TC | |
| R3052_ | CTTTCAAGACTAATAGAT | 559 |
| CasP | TGCTCCTTACGAGGAGAC | |
| hi12 | ATTCTCAAACAAATGTGT | |
| | CA | |
| R3053_ | CTTTCAAGACTAATAGAT | 560 |
| CasP | TGCTCCTTACGAGGAGAC | |
| hi12 | TGACACATTTGTTTGAGA | |
| | AT | |
| R3054_ | CTTTCAAGACTAATAGAT | 561 |
| CasP | TGCTCCTTACGAGGAGAC | |
| hi12 | TCAAACAAATGTGTCACA | |
| | AA | |
| R3055_ | CTTTCAAGACTAATAGAT | 562 |
| CasP | TGCTCCTTACGAGGAGAC | |
| hi12 | GTGACACATTTGTTTGAG | |
| | AA | |
| R3056_ | CTTTCAAGACTAATAGAT | 563 |
| CasP | TGCTCCTTACGAGGAGAC | |
| hi12 | CTTTGTGACACATTTGTT | |
| | TG | |
| R3057_ | CTTTCAAGACTAATAGAT | 564 |
| CasP | TGCTCCTTACGAGGAGAC | |
| hi12 | TGATGTGTATATCACAGA | |
| | CA | |
| R3058_ | CTTTCAAGACTAATAGAT | 565 |
| CasP | TGCTCCTTACGAGGAGAC | |
| hi12 | TCTGTGATATACACATCA | |
| | GA | |
| R3059_ | CTTTCAAGACTAATAGAT | 566 |
| CasP | TGCTCCTTACGAGGAGAC | |
| hi12 | GTCTGTGATATACACATC | |
| | AG | |
| R3060_ | CTTTCAAGACTAATAGAT | 567 |
| CasP | TGCTCCTTACGAGGAGAC | |
| hi12 | TGTCTGTGATATACACAT | |
| | CA | |
| R3061_ | CTTTCAAGACTAATAGAT | 568 |
| CasP | TGCTCCTTACGAGGAGAC | |
| hi12 | AAGTCCATAGACCTCATG | |
| | TC | |
| R3062_ | CTTTCAAGACTAATAGAT | 569 |
| CasP | TGCTCCTTACGAGGAGAC | |
| hi12 | CTCTTGAAGTCCATAGAC | |
| | CT | |
| R3063_ | CTTTCAAGACTAATAGAT | 570 |
| CasP | TGCTCCTTACGAGGAGAC | |
| hi12 | AAGAGCAACAGTGCTGTG | |
| | GC | |
| R3064_ | CTTTCAAGACTAATAGAT | 571 |
| CasP | TGCTCCTTACGAGGAGAC | |
| hi12 | CTCCAGGCCACAGCACTG | |
| | TT | |
| R3065_ | CTTTCAAGACTAATAGAT | 572 |
| CasP | TGCTCCTTACGAGGAGAC | |
| hi12 | TTGCTCCAGGCCACAGCA | |
| | CT | |
| R3066_ | CTTTCAAGACTAATAGAT | 573 |
| CasP | TGCTCCTTACGAGGAGAC | |
| hi12 | GTTGCTCCAGGCCACAGC | |
| | AC | |
| R3067_ | CTTTCAAGACTAATAGAT | 574 |
| CasP | TGCTCCTTACGAGGAGAC | |
| hi12 | CACATGCAAAGTCAGATT | |
| | TG | |
| R3068_ | CTTTCAAGACTAATAGAT | 575 |
| CasP | TGCTCCTTACGAGGAGAC | |
| hi12 | GCACATGCAAAGTCAGAT | |
| | TT | |
| R3069_ | CTTTCAAGACTAATAGAT | 576 |
| CasP | TGCTCCTTACGAGGAGAC | |
| hi12 | GCATGTGCAAACGCCTTC | |
| | AA | |
| R3070_ | CTTTCAAGACTAATAGAT | 577 |
| CasP | TGCTCCTTACGAGGAGAC | |
| hi12 | AAGGCGTTTGCACATGCA | |
| | AA | |
| R3071_ | CTTTCAAGACTAATAGAT | 578 |
| CasP | TGCTCCTTACGAGGAGAC | |
| hi12 | CATGTGCAAACGCCTTCA | |
| | AC | |
| R3072_ | CTTTCAAGACTAATAGAT | 579 |
| CasP | TGCTCCTTACGAGGAGAC | |
| hi12 | TTGAAGGCGTTTGCACAT | |
| | GC | |
| R3073_ | CTTTCAAGACTAATAGAT | 580 |
| CasP | TGCTCCTTACGAGGAGAC | |
| hi12 | AACAACAGCATTATTCCA | |
| | GA | |
| R3074_ | CTTTCAAGACTAATAGAT | 581 |
| CasP | TGCTCCTTACGAGGAGAC | |
| hi12 | TGGAATAATGCTGTTGTT | |
| | GA | |
| R3075_ | CTTTCAAGACTAATAGAT | 582 |
| CasP | TGCTCCTTACGAGGAGAC | |
| hi12 | TTCCAGAAGACACCTTCT | |
| | TC | |
| R3076_ | CTTTCAAGACTAATAGAT | 583 |
| CasP | TGCTCCTTACGAGGAGAC | |
| hi12 | CAGAAGACACCTTCTTCC | |
| | CC | |
| R3077_ | CTTTCAAGACTAATAGAT | 584 |
| CasP | TGCTCCTTACGAGGAGAC | |
| hi12 | CCTGGGCTGGGGAAGAAG | |
| | GT | |
| R3078_ | CTTTCAAGACTAATAGAT | 585 |
| CasP | TGCTCCTTACGAGGAGAC | |
| hi12 | TTCCCCAGCCCAGGTAAG | |
| | GG | |
| R3079_ | CTTTCAAGACTAATAGAT | 586 |
| CasP | TGCTCCTTACGAGGAGAC | |
| hi12 | CCCAGCCCAGGTAAGGGC | |
| | AG | |
| R3080_ | CTTTCAAGACTAATAGAT | 587 |
| CasP | TGCTCCTTACGAGGAGAC | |
| hi12 | TAAAAGGAAAAACAGACA | |
| | TT | |
| R3081_ | CTTTCAAGACTAATAGAT | 588 |
| CasP | TGCTCCTTACGAGGAGAC | |
| hi12 | CTAAAAGGAAAAACAGAC | |
| | AT | |
| R3082_ | CTTTCAAGACTAATAGAT | 589 |
| CasP | TGCTCCTTACGAGGAGAC | |
| hi12 | TTCCTTTTAGAAAGTTCC | |
| | TG | |
| R3083_ | CTTTCAAGACTAATAGAT | 590 |
| CasP | TGCTCCTTACGAGGAGAC | |
| hi12 | TCCTTTTAGAAAGTTCCT | |
| | GT | |
| R3084_ | CTTTCAAGACTAATAGAT | 591 |
| CasP | TGCTCCTTACGAGGAGAC | |
| hi12 | CCTTTTAGAAAGTTCCTG | |
| | TG | |
| R3085_ | CTTTCAAGACTAATAGAT | 592 |
| CasP | TGCTCCTTACGAGGAGAC | |
| hi12 | CTTTTAGAAAGTTCCTGT | |
| | GA | |
| R3086_ | CTTTCAAGACTAATAGAT | 593 |
| CasP | TGCTCCTTACGAGGAGAC | |
| hi12 | TAGAAAGTTCCTGTGATG | |
| | TC | |
| R3136_ | CTTTCAAGACTAATAGAT | 594 |
| CasP | TGCTCCTTACGAGGAGAC | |
| hi12 | AGAAAGTTCCTGTGATGT | |
| | CA | |
| R3137_ | CTTTCAAGACTAATAGAT | 595 |
| CasP | TGCTCCTTACGAGGAGAC | |
| hi12 | GAAAGTTCCTGTGATGTC | |
| | AA | |
| R3138_ | CTTTCAAGACTAATAGAT | 596 |
| CasP | TGCTCCTTACGAGGAGAC | |
| hi12 | ACATCACAGGAACTTTCT | |
| | AA | |
| R3139_ | CTTTCAAGACTAATAGAT | 597 |
| CasP | TGCTCCTTACGAGGAGAC | |
| hi12 | CTGTGATGTCAAGCTGGT | |
| | CG | |
| R3140_ | CTTTCAAGACTAATAGAT | 598 |
| CasP | TGCTCCTTACGAGGAGAC | |
| hi12 | TCGACCAGCTTGACATCA | |
| | CA | |
| R3141_ | CTTTCAAGACTAATAGAT | 599 |
| CasP | TGCTCCTTACGAGGAGAC | |
| hi12 | CTCGACCAGCTTGACATC | |
| | AC | |
| R3142_ | CTTTCAAGACTAATAGAT | 600 |
| CasP | TGCTCCTTACGAGGAGAC | |
| hi12 | TCTCGACCAGCTTGACAT | |
| | CA | |
| R3143_ | CTTTCAAGACTAATAGAT | 601 |
| CasP | TGCTCCTTACGAGGAGAC | |
| hi12 | AAAGCTTTTCTCGACCAG | |
| | CT | |
| R3144_ | CTTTCAAGACTAATAGAT | 602 |
| CasP | TGCTCCTTACGAGGAGAC | |
| hi12 | CAAAGCTTTTCTCGACCA | |
| | GC | |
| R3145_ | CTTTCAAGACTAATAGAT | 603 |
| CasP | TGCTCCTTACGAGGAGAC | |
| hi12 | CCTGTTTCAAAGCTTTTC | |
| | TC | |
| R3146_ | CTTTCAAGACTAATAGAT | 604 |
| CasP | TGCTCCTTACGAGGAGAC | |
| hi12 | GAAACAGGTAAGACAGGG | |
| | GT | |
| R3147_ | CTTTCAAGACTAATAGAT | 605 |
| CasP | TGCTCCTTACGAGGAGAC | |
| hi12 | AAACAGGTAAGACAGGGG | |
| | TC | |

TABLE J
CasΦ.32 gRNAs targeting human
TRAC in T cells

| | Spacer sequence | SEQ |
|---|---|---|
| | (5′ --> 3′), | ID |
| Name | shown as DNA | NO |
| R3040_ | GCTGGGGACCGATCCTGA | 606 |
| Cas | TTGCTCGCTGCGGCGAGA | |
| Phi32 | CTGGATATCTGTGGGACA | |
| | AGA | |
| R3041_ | GCTGGGGACCGATCCTGA | 607 |
| Cas | TTGCTCGCTGCGGCGAGA | |
| Phi32 | CTCCCACAGATATCCAGA | |
| | ACC | |
| R3042_ | GCTGGGGACCGATCCTGA | 608 |
| Cas | TTGCTCGCTGCGGCGAGA | |
| Phi32 | CGAGTCTCTCAGCTGGTA | |
| | CAC | |
| R3043_ | GCTGGGGACCGATCCTGA | 609 |
| Cas | TTGCTCGCTGCGGCGAGA | |
| Phi32 | CAGAGTCTCTCAGCTGGT | |
| | ACA | |
| R3044_ | GCTGGGGACCGATCCTGA | 610 |
| Cas | TTGCTCGCTGCGGCGAGA | |
| Phi32 | CTCACTGGATTTAGAGTC | |
| | TCT | |
| R3045_ | GCTGGGGACCGATCCTGA | 611 |
| Cas | TTGCTCGCTGCGGCGAGA | |
| Phi32 | CAGAATCAAAATCGGTGA | |
| | ATA | |
| R3046_ | GCTGGGGACCGATCCTGA | 612 |
| Cas | TTGCTCGCTGCGGCGAGA | |
| Phi32 | CGAGAATCAAAATCGGTG | |
| | AAT | |
| R3047_ | GCTGGGGACCGATCCTGA | 613 |
| Cas | TTGCTCGCTGCGGCGAGA | |
| Phi32 | CACCGATTTTGATTCTCA | |
| | AAC | |
| R3048_ | GCTGGGGACCGATCCTGA | 614 |
| Cas | TTGCTCGCTGCGGCGAGA | |
| Phi32 | CTTTGAGAATCAAAATCG | |
| | GTG | |
| R3049_ | GCTGGGGACCGATCCTGA | 615 |
| Cas | TTGCTCGCTGCGGCGAGA | |
| Phi32 | CGTTTGAGAATCAAAATC | |
| | GGT | |
| R3050_ | GCTGGGGACCGATCCTGA | 616 |
| Cas | TTGCTCGCTGCGGCGAGA | |
| Phi32 | CTGATTCTCAAACAAATG | |
| | TGT | |
| R3051_ | GCTGGGGACCGATCCTGA | 617 |
| Cas | TTGCTCGCTGCGGCGAGA | |
| Phi32 | CGATTCTCAAACAAATGT | |
| | GTC | |
| R3052_ | GCTGGGGACCGATCCTGA | 618 |
| Cas | TTGCTCGCTGCGGCGAGA | |
| Phi32 | CATTCTCAAACAAATGTG | |
| | TCA | |
| R3053_ | GCTGGGGACCGATCCTGA | 619 |
| Cas | TTGCTCGCTGCGGCGAGA | |
| Phi32 | CTGACACATTTGTTTGAG | |
| | AAT | |
| R3054_ | GCTGGGGACCGATCCTGA | 620 |
| Cas | TTGCTCGCTGCGGCGAGA | |
| Phi32 | CTCAAACAAATGTGTCAC | |
| | AAA | |
| R3055_ | GCTGGGGACCGATCCTGA | 621 |
| Cas | TTGCTCGCTGCGGCGAGA | |
| Phi32 | CGTGACACATTTGTTTGA | |
| | GAA | |
| R3056_ | GCTGGGGACCGATCCTGA | 622 |
| Cas | TTGCTCGCTGCGGCGAGA | |
| Phi32 | CCTTTGTGACACATTTGT | |
| | TTG | |
| R3057_ | GCTGGGGACCGATCCTGA | 623 |
| Cas | TTGCTCGCTGCGGCGAGA | |
| Phi32 | CTGATGTGTATATCACAG | |
| | ACA | |
| R3058_ | GCTGGGGACCGATCCTGA | 624 |
| Cas | TTGCTCGCTGCGGCGAGA | |
| Phi32 | CTCTGTGATATACACATC | |
| | AGA | |
| R3059_ | GCTGGGGACCGATCCTGA | 625 |
| Cas | TTGCTCGCTGCGGCGAGA | |
| Phi32 | CGTCTGTGATATACACAT | |
| | CAG | |
| R3060_ | GCTGGGGACCGATCCTGA | 626 |
| Cas | TTGCTCGCTGCGGCGAGA | |
| Phi32 | CTGTCTGTGATATACACA | |
| | TCA | |
| R3061_ | GCTGGGGACCGATCCTGA | 627 |
| Cas | TTGCTCGCTGCGGCGAGA | |
| Phi32 | CAAGTCCATAGACCTCAT | |
| | GTC | |
| R3062_ | GCTGGGGACCGATCCTGA | 628 |
| Cas | TTGCTCGCTGCGGCGAGA | |
| Phi32 | CCTCTTGAAGTCCATAGA | |
| | CCT | |
| R3063_ | GCTGGGGACCGATCCTGA | 629 |
| Cas | TTGCTCGCTGCGGCGAGA | |
| Phi32 | CAAGAGCAACAGTGCTGT | |
| | GGC | |
| R3064_ | GCTGGGGACCGATCCTGA | 630 |
| Cas | TTGCTCGCTGCGGCGAGA | |
| Phi32 | CCTCCAGGCCACAGCACT | |
| | GTT | |
| R3065_ | GCTGGGGACCGATCCTGA | 631 |
| Cas | TTGCTCGCTGCGGCGAGA | |
| Phi32 | CTTGCTCCAGGCCACAGC | |
| | ACT | |
| R3066_ | GCTGGGGACCGATCCTGA | 632 |
| Cas | TTGCTCGCTGCGGCGAGA | |
| Phi32 | CGTTGCTCCAGGCCACAG | |
| | CAC | |
| R3067_ | GCTGGGGACCGATCCTGA | 633 |
| Cas | TTGCTCGCTGCGGCGAGA | |
| Phi32 | CCACATGCAAAGTCAGAT | |
| | TTG | |
| R3068_ | GCTGGGGACCGATCCTGA | 634 |
| Cas | TTGCTCGCTGCGGCGAGA | |
| Phi32 | CGCACATGCAAAGTCAGA | |
| | TTT | |
| R3069_ | GCTGGGGACCGATCCTGA | 635 |
| Cas | TTGCTCGCTGCGGCGAGA | |
| Phi32 | CGCATGTGCAAACGCCTT | |
| | CAA | |
| R3070_ | GCTGGGGACCGATCCTGA | 636 |
| Cas | TTGCTCGCTGCGGCGAGA | |
| Phi32 | CAAGGCGTTTGCACATGC | |
| | AAA | |
| R3071_ | GCTGGGGACCGATCCTGA | 637 |
| Cas | TTGCTCGCTGCGGCGAGA | |
| Phi32 | CCATGTGCAAACGCCTTC | |
| | AAC | |
| R3072_ | GCTGGGGACCGATCCTGA | 638 |
| Cas | TTGCTCGCTGCGGCGAGA | |
| Phi32 | CTTGAAGGCGTTTGCACA | |
| | TGC | |
| R3073_ | GCTGGGGACCGATCCTGA | 639 |
| Cas | TTGCTCGCTGCGGCGAGA | |
| Phi32 | CAACAACAGCATTATTCC | |
| | AGA | |
| R3074_ | GCTGGGGACCGATCCTGA | 640 |
| Cas | TTGCTCGCTGCGGCGAGA | |
| Phi32 | CTGGAATAATGCTGTTGT | |
| | TGA | |
| R3075_ | GCTGGGGACCGATCCTGA | 641 |
| Cas | TTGCTCGCTGCGGCGAGA | |
| Phi32 | CTTCCAGAAGACACCTTC | |
| | TTC | |
| R3076_ | GCTGGGGACCGATCCTGA | 642 |
| Cas | TTGCTCGCTGCGGCGAGA | |
| Phi32 | CCAGAAGACACCTTCTTC | |
| | CCC | |
| R3077_ | GCTGGGGACCGATCCTGA | 643 |
| Cas | TTGCTCGCTGCGGCGAGA | |
| Phi32 | CCCTGGGCTGGGGAAGAA | |
| | GGT | |
| R3078_ | GCTGGGGACCGATCCTGA | 644 |
| Cas | TTGCTCGCTGCGGCGAGA | |
| Phi32 | CTTCCCCAGCCCAGGTAA | |
| | GGG | |
| R3079_ | GCTGGGGACCGATCCTGA | 645 |
| Cas | TTGCTCGCTGCGGCGAGA | |
| Phi32 | CCCCAGCCCAGGTAAGGG | |
| | CAG | |
| R3080_ | GCTGGGGACCGATCCTGA | 646 |
| Cas | TTGCTCGCTGCGGCGAGA | |
| Phi32 | CTAAAAGGAAAAACAGAC | |
| | ATT | |
| R3081_ | GCTGGGGACCGATCCTGA | 647 |
| Cas | TTGCTCGCTGCGGCGAGA | |
| Phi32 | CCTAAAAGGAAAAACAGA | |
| | CAT | |
| R3082_ | GCTGGGGACCGATCCTGA | 648 |
| Cas | TTGCTCGCTGCGGCGAGA | |
| Phi32 | CTTCCTTTTAGAAAGTTC | |
| | CTG | |
| R3083_ | GCTGGGGACCGATCCTGA | 649 |
| Cas | TTGCTCGCTGCGGCGAGA | |
| Phi32 | CTCCTTTTAGAAAGTTCC | |
| | TGT | |
| R3084_ | GCTGGGGACCGATCCTGA | 650 |
| Cas | TTGCTCGCTGCGGCGAGA | |
| Phi32 | CCCTTTTAGAAAGTTCCT | |
| | GTG | |
| R3085_ | GCTGGGGACCGATCCTGA | 651 |
| Cas | TTGCTCGCTGCGGCGAGA | |
| Phi32 | CCTTTTAGAAAGTTCCTG | |
| | TGA | |
| R3086_ | GCTGGGGACCGATCCTGA | 652 |
| Cas | TTGCTCGCTGCGGCGAGA | |
| Phi32 | CTAGAAAGTTCCTGTGAT | |
| | GTC | |
| R3136_ | GCTGGGGACCGATCCTGA | 653 |
| Cas | TTGCTCGCTGCGGCGAGA | |
| Phi32 | CAGAAAGTTCCTGTGATG | |
| | TCA | |
| R3137_ | GCTGGGGACCGATCCTGA | 654 |
| Cas | TTGCTCGCTGCGGCGAGA | |
| Phi32 | CGAAAGTTCCTGTGATGT | |
| | CAA | |
| R3138_ | GCTGGGGACCGATCCTGA | 655 |
| Cas | TTGCTCGCTGCGGCGAGA | |
| Phi32 | CACATCACAGGAACTTTC | |
| | TAA | |
| R3139_ | GCTGGGGACCGATCCTGA | 656 |
| Cas | TTGCTCGCTGCGGCGAGA | |
| Phi32 | CCTGTGATGTCAAGCTGG | |
| | TCG | |
| R3140_ | GCTGGGGACCGATCCTGA | 657 |
| Cas | TTGCTCGCTGCGGCGAGA | |
| Phi32 | CTCGACCAGCTTGACATC | |
| | ACA | |
| R3141_ | GCTGGGGACCGATCCTGA | 658 |
| Cas | TTGCTCGCTGCGGCGAGA | |
| Phi32 | CCTCGACCAGCTTGACAT | |
| | CAC | |
| R3142_ | GCTGGGGACCGATCCTGA | 659 |
| Cas | TTGCTCGCTGCGGCGAGA | |
| Phi32 | CTCTCGACCAGCTTGACA | |
| | TCA | |
| R3143_ | GCTGGGGACCGATCCTGA | 660 |
| Cas | TTGCTCGCTGCGGCGAGA | |
| Phi32 | CAAAGCTTTTCTCGACCA | |
| | GCT | |
| R3144_ | GCTGGGGACCGATCCTGA | 661 |
| Cas | TTGCTCGCTGCGGCGAGA | |
| Phi32 | CCAAAGCTTTTCTCGACC | |
| | AGC | |
| R3145_ | GCTGGGGACCGATCCTGA | 662 |
| Cas | TTGCTCGCTGCGGCGAGA | |
| Phi32 | CCCTGTTTCAAAGCTTTT | |
| | CTC | |
| R3146_ | GCTGGGGACCGATCCTGA | 663 |
| Cas | TTGCTCGCTGCGGCGAGA | |
| Phi32 | CGAAACAGGTAAGACAGG | |
| | GGT | |
| R3147_ | GCTGGGGACCGATCCTGA | 664 |
| Cas | TTGCTCGCTGCGGCGAGA | |
| Phi32 | CAAACAGGTAAGACAGGG | |
| | GTC | |

TABLE K
CasΦ.12 gRNAs targeting human
B2M in T cells

| | Spacer sequence | SEQ |
|---|---|---|
| | (5′ --> 3′), | ID |
| Name | shown as DNA | NO |
| R3087_ | CTTTCAAGACTAATAGAT | 665 |
| CasP | TGCTCCTTACGAGGAGAC | |
| hi12 | AATATAAGTGGAGGCGTC | |
| | GC | |
| R3088_ | CTTTCAAGACTAATAGAT | 666 |
| CasP | TGCTCCTTACGAGGAGAC | |
| hi12 | ATATAAGTGGAGGCGTCG | |
| | CG | |
| R3089_ | CTTTCAAGACTAATAGAT | 667 |
| CasP | TGCTCCTTACGAGGAGAC | |
| hi12 | AGGAATGCCCGCCAGCGC | |
| | GA | |
| R3090_ | CTTTCAAGACTAATAGAT | 668 |
| CasP | TGCTCCTTACGAGGAGAC | |
| hi12 | CTGAAGCTGACAGCATTC | |
| | GG | |
| R3091_ | CTTTCAAGACTAATAGAT | 669 |
| CasP | TGCTCCTTACGAGGAGAC | |
| hi12 | GGGCCGAGATGTCTCGCT | |
| | CC | |
| R3092_ | CTTTCAAGACTAATAGAT | 670 |
| CasP | TGCTCCTTACGAGGAGAC | |
| hi12 | GCTGTGCTCGCGCTACTC | |
| | TC | |
| R3093_ | CTTTCAAGACTAATAGAT | 671 |
| CasP | TGCTCCTTACGAGGAGAC | |
| hi12 | CTGGCCTGGAGGCTATCC | |
| | AG | |
| R3094_ | CTTTCAAGACTAATAGAT | 672 |
| CasP | TGCTCCTTACGAGGAGAC | |
| hi12 | TGGCCTGGAGGCTATCCA | |
| | GC | |
| R3095_ | CTTTCAAGACTAATAGAT | 673 |
| CasP | TGCTCCTTACGAGGAGAC | |
| hi12 | ATGTGTCTTTTCCCGATA | |
| | TT | |
| R3096_ | CTTTCAAGACTAATAGAT | 674 |
| CasP | TGCTCCTTACGAGGAGAC | |
| hi12 | TCCCGATATTCCTCAGGT | |
| | AC | |
| R3097_ | CTTTCAAGACTAATAGAT | 675 |
| CasP | TGCTCCTTACGAGGAGAC | |
| hi12 | CCCGATATTCCTCAGGTA | |
| | CT | |
| R3098_ | CTTTCAAGACTAATAGAT | 676 |
| CasP | TGCTCCTTACGAGGAGAC | |
| hi12 | CCGATATTCCTCAGGTAC | |
| | TC | |
| R3099_ | CTTTCAAGACTAATAGAT | 677 |
| CasP | TGCTCCTTACGAGGAGAC | |
| hi12 | GAGTACCTGAGGAATATC | |
| | GG | |
| R3100_ | CTTTCAAGACTAATAGAT | 678 |
| CasP | TGCTCCTTACGAGGAGAC | |
| hi12 | GGAGTACCTGAGGAATAT | |
| | CG | |
| R3101_ | CTTTCAAGACTAATAGAT | 679 |
| CasP | TGCTCCTTACGAGGAGAC | |
| hi12 | CTCAGGTACTCCAAAGAT | |
| | TC | |
| R3102_ | CTTTCAAGACTAATAGAT | 680 |
| CasP | TGCTCCTTACGAGGAGAC | |
| hi12 | AGGTTTACTCACGTCATC | |
| | CA | |
| R3103_ | CTTTCAAGACTAATAGAT | 681 |
| CasP | TGCTCCTTACGAGGAGAC | |
| hi12 | ACTCACGTCATCCAGCAG | |
| | AG | |
| R3104_ | CTTTCAAGACTAATAGAT | 682 |
| CasP | TGCTCCTTACGAGGAGAC | |
| hi12 | CTCACGTCATCCAGCAGA | |
| | GA | |
| R3105_ | CTTTCAAGACTAATAGAT | 683 |
| CasP | TGCTCCTTACGAGGAGAC | |
| hi12 | TCTGCTGGATGACGTGAG | |
| | TA | |
| R3106_ | CTTTCAAGACTAATAGAT | 684 |
| CasP | TGCTCCTTACGAGGAGAC | |
| hi12 | CATTCTCTGCTGGATGAC | |
| | GT | |
| R3107_ | CTTTCAAGACTAATAGAT | 685 |
| CasP | TGCTCCTTACGAGGAGAC | |
| hi12 | CCATTCTCTGCTGGATGA | |
| | CG | |
| R3108_ | CTTTCAAGACTAATAGAT | 686 |
| CasP | TGCTCCTTACGAGGAGAC | |
| hi12 | ACTTTCCATTCTCTGCTG | |
| | GA | |
| R3109_ | CTTTCAAGACTAATAGAT | 687 |
| CasP | TGCTCCTTACGAGGAGAC | |
| hi12 | GACTTTCCATTCTCTGCT | |
| | GG | |
| R3110_ | CTTTCAAGACTAATAGAT | 688 |
| CasP | TGCTCCTTACGAGGAGAC | |
| hi12 | AGGAAATTTGACTTTCCA | |
| | TT | |
| R3111_ | CTTTCAAGACTAATAGAT | 689 |
| CasP | TGCTCCTTACGAGGAGAC | |
| hi12 | CCTGAATTGCTATGTGTC | |
| | TG | |
| R3112_ | CTTTCAAGACTAATAGAT | 690 |
| CasP | TGCTCCTTACGAGGAGAC | |
| hi12 | CTGAATTGCTATGTGTCT | |
| | GG | |
| R3113_ | CTTTCAAGACTAATAGAT | 691 |
| CasP | TGCTCCTTACGAGGAGAC | |
| hi12 | CTATGTGTCTGGGTTTCA | |
| | TC | |
| R3114_ | CTTTCAAGACTAATAGAT | 692 |
| CasP | TGCTCCTTACGAGGAGAC | |
| hi12 | AATGTCGGATGGATGAAA | |
| | CC | |
| R3115_ | CTTTCAAGACTAATAGAT | 693 |
| CasP | TGCTCCTTACGAGGAGAC | |
| hi12 | CATCCATCCGACATTGAA | |
| | GT | |
| R3116_ | CTTTCAAGACTAATAGAT | 694 |
| CasP | TGCTCCTTACGAGGAGAC | |
| hi12 | ATCCATCCGACATTGAAG | |
| | TT | |
| R3117_ | CTTTCAAGACTAATAGAT | 695 |
| CasP | TGCTCCTTACGAGGAGAC | |
| hi12 | AGTAAGTCAACTTCAATG | |
| | TC | |
| R3118_ | CTTTCAAGACTAATAGAT | 696 |
| CasP | TGCTCCTTACGAGGAGAC | |
| hi12 | TTCAGTAAGTCAACTTCA | |
| | AT | |
| R3119_ | CTTTCAAGACTAATAGAT | 697 |
| CasP | TGCTCCTTACGAGGAGAC | |
| hi12 | AAGTTGACTTACTGAAGA | |
| | AT | |
| R3120_ | CTTTCAAGACTAATAGAT | 698 |
| CasP | TGCTCCTTACGAGGAGAC | |
| hi12 | ACTTACTGAAGAATGGAG | |
| | AG | |
| R3121_ | CTTTCAAGACTAATAGAT | 699 |
| CasP | TGCTCCTTACGAGGAGAC | |
| hi12 | TCTCTCCATTCTTCAGTA | |
| | AG | |
| R3122_ | CTTTCAAGACTAATAGAT | 700 |
| CasP | TGCTCCTTACGAGGAGAC | |
| hi12 | CTGAAGAATGGAGAGAGA | |
| | AT | |
| R3123_ | CTTTCAAGACTAATAGAT | 701 |
| CasP | TGCTCCTTACGAGGAGAC | |
| hi12 | AATTCTCTCTCCATTCTT | |
| | CA | |
| R3124_ | CTTTCAAGACTAATAGAT | 702 |
| CasP | TGCTCCTTACGAGGAGAC | |
| hi12 | CAATTCTCTCTCCATTCT | |
| | TC | |
| R3125_ | CTTTCAAGACTAATAGAT | 703 |
| CasP | TGCTCCTTACGAGGAGAC | |
| hi12 | TCAATTCTCTCTCCATTC | |
| | TT | |
| R3126_ | CTTTCAAGACTAATAGAT | 704 |
| CasP | TGCTCCTTACGAGGAGAC | |
| hi12 | TTCAATTCTCTCTCCATT | |
| | CT | |
| R3127_ | CTTTCAAGACTAATAGAT | 705 |
| CasP | TGCTCCTTACGAGGAGAC | |
| hi12 | AAAAAGTGGAGCATTCAG | |
| | AC | |
| R3128_ | CTTTCAAGACTAATAGAT | 706 |
| CasP | TGCTCCTTACGAGGAGAC | |
| hi12 | CTGAAAGACAAGTCTGAA | |
| | TG | |
| R3129_ | CTTTCAAGACTAATAGAT | 707 |
| CasP | TGCTCCTTACGAGGAGAC | |
| hi12 | AGACTTGTCTTTCAGCAA | |
| | GG | |
| R3130_ | CTTTCAAGACTAATAGAT | 708 |
| CasP | TGCTCCTTACGAGGAGAC | |
| hi12 | TCTTTCAGCAAGGACTGG | |
| | TC | |
| R3131_ | CTTTCAAGACTAATAGAT | 709 |
| CasP | TGCTCCTTACGAGGAGAC | |
| hi12 | CAGCAAGGACTGGTCTTT | |
| | CT | |
| R3132_ | CTTTCAAGACTAATAGAT | 710 |
| CasP | TGCTCCTTACGAGGAGAC | |
| hi12 | AGCAAGGACTGGTCTTTC | |
| | TA | |
| R3133_ | CTTTCAAGACTAATAGAT | 711 |
| CasP | TGCTCCTTACGAGGAGAC | |
| hi12 | CTATCTCTTGTACTACAC | |
| | TG | |
| R3134_ | CTTTCAAGACTAATAGAT | 712 |
| CasP | TGCTCCTTACGAGGAGAC | |
| hi12 | TATCTCTTGTACTACACT | |
| | GA | |
| R3135_ | CTTTCAAGACTAATAGAT | 713 |
| CasP | TGCTCCTTACGAGGAGAC | |
| hi12 | AGTGTAGTACAAGAGATA | |
| | GA | |
| R3148_ | CTTTCAAGACTAATAGAT | 714 |
| CasP | TGCTCCTTACGAGGAGAC | |
| hi12 | TACTACACTGAATTCACC | |
| | CC | |
| R3149_ | CTTTCAAGACTAATAGAT | 715 |
| CasP | TGCTCCTTACGAGGAGAC | |
| hi12 | AGTGGGGGTGAATTCAGT | |
| | GT | |
| R3150_ | CTTTCAAGACTAATAGAT | 716 |
| CasP | TGCTCCTTACGAGGAGAC | |
| hi12 | CAGTGGGGGTGAATTCAG | |
| | TG | |
| R3151_ | CTTTCAAGACTAATAGAT | 717 |
| CasP | TGCTCCTTACGAGGAGAC | |
| hi12 | TCAGTGGGGGTGAATTCA | |
| | GT | |
| R3152_ | CTTTCAAGACTAATAGAT | 718 |
| CasP | TGCTCCTTACGAGGAGAC | |
| hi12 | TTCAGTGGGGGTGAATTC | |
| | AG | |
| R3153_ | CTTTCAAGACTAATAGAT | 719 |
| CasP | TGCTCCTTACGAGGAGAC | |
| hi12 | ACCCCCACTGAAAAAGAT | |
| | GA | |
| R3154_ | CTTTCAAGACTAATAGAT | 720 |
| CasP | TGCTCCTTACGAGGAGAC | |
| hi12 | ACACGGCAGGCATACTCA | |
| | TC | |
| R3155_ | CTTTCAAGACTAATAGAT | 721 |
| CasP | TGCTCCTTACGAGGAGAC | |
| hi12 | GGCTGTGACAAAGTCACA | |
| | TG | |
| R3156_ | CTTTCAAGACTAATAGAT | 722 |
| CasP | TGCTCCTTACGAGGAGAC | |
| hi12 | GTCACAGCCCAAGATAGT | |
| | TA | |
| R3157_ | CTTTCAAGACTAATAGAT | 723 |
| CasP | TGCTCCTTACGAGGAGAC | |
| hi12 | TCACAGCCCAAGATAGTT | |
| | AA | |
| R3158_ | CTTTCAAGACTAATAGAT | 724 |
| CasP | TGCTCCTTACGAGGAGAC | |
| hi12 | ACTATCTTGGGCTGTGAC | |
| | AA | |
| R3159_ | CTTTCAAGACTAATAGAT | 725 |
| CasP | TGCTCCTTACGAGGAGAC | |
| hi12 | CCCCACTTAACTATCTTG | |
| | GG | |

TABLE L
CasΦ.32 gRNAs targeting
human B2M in T cells

| | Spacer sequence | SEQ |
|---|---|---|
| | (5′ --> 3′), | ID |
| Name | shown as DNA | NO |
| R3087_ | GCTGGGGACCGATCCTGA | 726 |
| CasP | TTGCTCGCTGCGGCGAGA | |
| hi32 | CAATATAAGTGGAGGCGT | |
| | CGC | |
| R3088_ | GCTGGGGACCGATCCTGA | 727 |
| CasP | TTGCTCGCTGCGGCGAGA | |
| hi32 | CATATAAGTGGAGGCGTC | |
| | GCG | |
| R3089_ | GCTGGGGACCGATCCTGA | 728 |
| CasP | TTGCTCGCTGCGGCGAGA | |
| hi32 | CAGGAATGCCCGCCAGCG | |
| | CGA | |
| R3090_ | GCTGGGGACCGATCCTGA | 729 |
| CasP | TTGCTCGCTGCGGCGAGA | |
| hi32 | CCTGAAGCTGACAGCATT | |
| | CGG | |
| R3091_ | GCTGGGGACCGATCCTGA | 730 |
| CasP | TTGCTCGCTGCGGCGAGA | |
| hi32 | CGGGCCGAGATGTCTCGC | |
| | TCC | |
| R3092_ | GCTGGGGACCGATCCTGA | 731 |
| CasP | TTGCTCGCTGCGGCGAGA | |
| hi32 | CGCTGTGCTCGCGCTACT | |
| | CTC | |
| R3093_ | GCTGGGGACCGATCCTGA | 732 |
| CasP | TTGCTCGCTGCGGCGAGA | |
| hi32 | CCTGGCCTGGAGGCTATC | |
| | CAG | |
| R3094_ | GCTGGGGACCGATCCTGA | 733 |
| CasP | TTGCTCGCTGCGGCGAGA | |
| hi32 | CTGGCCTGGAGGCTATCC | |
| | AGC | |
| R3095_ | GCTGGGGACCGATCCTGA | 734 |
| CasP | TTGCTCGCTGCGGCGAGA | |
| hi32 | CATGTGTCTTTTCCCGAT | |
| | ATT | |
| R3096_ | GCTGGGGACCGATCCTGA | 735 |
| CasP | TTGCTCGCTGCGGCGAGA | |
| hi32 | CTCCCGATATTCCTCAGG | |
| | TAC | |
| R3097_ | GCTGGGGACCGATCCTGA | 736 |
| CasP | TTGCTCGCTGCGGCGAGA | |
| hi32 | CCCCGATATTCCTCAGGT | |
| | ACT | |
| R3098_ | GCTGGGGACCGATCCTGA | 737 |
| CasP | TTGCTCGCTGCGGCGAGA | |
| hi32 | CCCGATATTCCTCAGGTA | |
| | CTC | |
| R3099_ | GCTGGGGACCGATCCTGA | 738 |
| CasP | TTGCTCGCTGCGGCGAGA | |
| hi32 | CGAGTACCTGAGGAATAT | |
| | CGG | |
| R3100_ | GCTGGGGACCGATCCTGA | 739 |
| CasP | TTGCTCGCTGCGGCGAGA | |
| hi32 | CGGAGTACCTGAGGAATA | |
| | TCG | |
| R3101_ | GCTGGGGACCGATCCTGA | 740 |
| CasP | TTGCTCGCTGCGGCGAGA | |
| hi32 | CCTCAGGTACTCCAAAGA | |
| | TTC | |
| R3102_ | GCTGGGGACCGATCCTGA | 741 |
| CasP | TTGCTCGCTGCGGCGAGA | |
| hi32 | CAGGTTTACTCACGTCAT | |
| | CCA | |
| R3103_ | GCTGGGGACCGATCCTGA | 742 |
| CasP | TTGCTCGCTGCGGCGAGA | |
| hi32 | CACTCACGTCATCCAGCA | |
| | GAG | |
| R3104_ | GCTGGGGACCGATCCTGA | 743 |
| CasP | TTGCTCGCTGCGGCGAGA | |
| hi32 | CCTCACGTCATCCAGCAG | |
| | AGA | |
| R3105_ | GCTGGGGACCGATCCTGA | 744 |
| CasP | TTGCTCGCTGCGGCGAGA | |
| hi32 | CTCTGCTGGATGACGTGA | |
| | GTA | |
| R3106_ | GCTGGGGACCGATCCTGA | 745 |
| CasP | TTGCTCGCTGCGGCGAGA | |
| hi32 | CCATTCTCTGCTGGATGA | |
| | CGT | |
| R3107_ | GCTGGGGACCGATCCTGA | 746 |
| CasP | TTGCTCGCTGCGGCGAGA | |
| hi32 | CCCATTCTCTGCTGGATG | |
| | ACG | |
| R3108_ | GCTGGGGACCGATCCTGA | 747 |
| CasP | TTGCTCGCTGCGGCGAGA | |
| hi32 | CACTTTCCATTCTCTGCT | |
| | GGA | |
| R3109_ | GCTGGGGACCGATCCTGA | 748 |
| CasP | TTGCTCGCTGCGGCGAGA | |
| hi32 | CGACTTTCCATTCTCTGC | |
| | TGG | |
| R3110_ | GCTGGGGACCGATCCTGA | 749 |
| CasP | TTGCTCGCTGCGGCGAGA | |
| hi32 | CAGGAAATTTGACTTTCC | |
| | ATT | |
| R3111_ | GCTGGGGACCGATCCTGA | 750 |
| CasP | TTGCTCGCTGCGGCGAGA | |
| hi32 | CCCTGAATTGCTATGTGT | |
| | CTG | |
| R3112_ | GCTGGGGACCGATCCTGA | 751 |
| CasP | TTGCTCGCTGCGGCGAGA | |
| hi32 | CCTGAATTGCTATGTGTC | |
| | TGG | |
| R3113_ | GCTGGGGACCGATCCTGA | 752 |
| CasP | TTGCTCGCTGCGGCGAGA | |
| hi32 | CCTATGTGTCTGGGTTTC | |
| | ATC | |
| R3114_ | GCTGGGGACCGATCCTGA | 753 |
| CasP | TTGCTCGCTGCGGCGAGA | |
| hi32 | CAATGTCGGATGGATGAA | |
| | ACC | |
| R3115_ | GCTGGGGACCGATCCTGA | 754 |
| CasP | TTGCTCGCTGCGGCGAGA | |
| hi32 | CCATCCATCCGACATTGA | |
| | AGT | |
| R3116_ | GCTGGGGACCGATCCTGA | 755 |
| CasP | TTGCTCGCTGCGGCGAGA | |
| hi32 | CATCCATCCGACATTGAA | |
| | GTT | |
| R3117_ | GCTGGGGACCGATCCTGA | 756 |
| CasP | TTGCTCGCTGCGGCGAGA | |
| hi32 | CAGTAAGTCAACTTCAAT | |
| | GTC | |
| R3118_ | GCTGGGGACCGATCCTGA | 757 |
| CasP | TTGCTCGCTGCGGCGAGA | |
| hi32 | CTTCAGTAAGTCAACTTC | |
| | AAT | |
| R3119_ | GCTGGGGACCGATCCTGA | 758 |
| CasP | TTGCTCGCTGCGGCGAGA | |
| hi32 | CAAGTTGACTTACTGAAG | |
| | AAT | |
| R3120_ | GCTGGGGACCGATCCTGA | 759 |
| CasP | TTGCTCGCTGCGGCGAGA | |
| hi32 | CACTTACTGAAGAATGGA | |
| | GAG | |
| R3121_ | GCTGGGGACCGATCCTGA | 760 |
| CasP | TTGCTCGCTGCGGCGAGA | |
| hi32 | CTCTCTCCATTCTTCAGT | |
| | AAG | |
| R3122_ | GCTGGGGACCGATCCTGA | 761 |
| CasP | TTGCTCGCTGCGGCGAGA | |
| hi32 | CCTGAAGAATGGAGAGAG | |
| | AAT | |
| R3123_ | GCTGGGGACCGATCCTGA | 762 |
| CasP | TTGCTCGCTGCGGCGAGA | |
| hi32 | CAATTCTCTCTCCATTCT | |
| | TCA | |
| R3124_ | GCTGGGGACCGATCCTGA | 763 |
| CasP | TTGCTCGCTGCGGCGAGA | |
| hi32 | CCAATTCTCTCTCCATTC | |
| | TTC | |
| R3125_ | GCTGGGGACCGATCCTGA | 764 |
| CasP | TTGCTCGCTGCGGCGAGA | |
| hi32 | CTCAATTCTCTCTCCATT | |
| | CTT | |
| R3126_ | GCTGGGGACCGATCCTGA | 765 |
| CasP | TTGCTCGCTGCGGCGAGA | |
| hi32 | CTTCAATTCTCTCTCCAT | |
| | TCT | |
| R3127_ | GCTGGGGACCGATCCTGA | 766 |
| CasP | TTGCTCGCTGCGGCGAGA | |
| hi32 | CAAAAAGTGGAGCATTCA | |
| | GAC | |
| R3128_ | GCTGGGGACCGATCCTGA | 767 |
| CasP | TTGCTCGCTGCGGCGAGA | |
| hi32 | CCTGAAAGACAAGTCTGA | |
| | ATG | |
| R3129_ | GCTGGGGACCGATCCTGA | 768 |
| CasP | TTGCTCGCTGCGGCGAGA | |
| hi32 | CAGACTTGTCTTTCAGCA | |
| | AGG | |
| R3130_ | GCTGGGGACCGATCCTGA | 769 |
| CasP | TTGCTCGCTGCGGCGAGA | |
| hi32 | CTCTTTCAGCAAGGACTG | |
| | GTC | |
| R3131_ | GCTGGGGACCGATCCTGA | 770 |
| CasP | TTGCTCGCTGCGGCGAGA | |
| hi32 | CCAGCAAGGACTGGTCTT | |
| | TCT | |
| R3132_ | GCTGGGGACCGATCCTGA | 771 |
| CasP | TTGCTCGCTGCGGCGAGA | |
| hi32 | CAGCAAGGACTGGTCTTT | |
| | CTA | |
| R3133_ | GCTGGGGACCGATCCTGA | 772 |
| CasP | TTGCTCGCTGCGGCGAGA | |
| hi32 | CCTATCTCTTGTACTACA | |
| | CTG | |
| R3134_ | GCTGGGGACCGATCCTGA | 773 |
| CasP | TTGCTCGCTGCGGCGAGA | |
| hi32 | CTATCTCTTGTACTACAC | |
| | TGA | |
| R3135_ | GCTGGGGACCGATCCTGA | 774 |
| CasP | TTGCTCGCTGCGGCGAGA | |
| hi32 | CAGTGTAGTACAAGAGAT | |
| | AGA | |
| R3148_ | GCTGGGGACCGATCCTGA | 775 |
| CasP | TTGCTCGCTGCGGCGAGA | |
| hi32 | CTACTACACTGAATTCAC | |
| | CCC | |
| R3149_ | GCTGGGGACCGATCCTGA | 776 |
| CasP | TTGCTCGCTGCGGCGAGA | |
| hi32 | CAGTGGGGGTGAATTCAG | |
| | TGT | |
| R3150_ | GCTGGGGACCGATCCTGA | 777 |
| CasP | TTGCTCGCTGCGGCGAGA | |
| hi32 | CCAGTGGGGGTGAATTCA | |
| | GTG | |
| R3151_ | GCTGGGGACCGATCCTGA | 778 |
| CasP | TTGCTCGCTGCGGCGAGA | |
| hi32 | CTCAGTGGGGGTGAATTC | |
| | AGT | |
| R3152_ | GCTGGGGACCGATCCTGA | 779 |
| CasP | TTGCTCGCTGCGGCGAGA | |
| hi32 | CTTCAGTGGGGGTGAATT | |
| | CAG | |
| R3153_ | GCTGGGGACCGATCCTGA | 780 |
| CasP | TTGCTCGCTGCGGCGAGA | |
| hi32 | CACCCCCACTGAAAAAGA | |
| | TGA | |
| R3154_ | GCTGGGGACCGATCCTGA | 781 |
| CasP | TTGCTCGCTGCGGCGAGA | |
| hi32 | CACACGGCAGGCATACTC | |
| | ATC | |
| R3155_ | GCTGGGGACCGATCCTGA | 782 |
| CasP | TTGCTCGCTGCGGCGAGA | |
| hi32 | CGGCTGTGACAAAGTCAC | |
| | ATG | |
| R3156_ | GCTGGGGACCGATCCTGA | 783 |
| CasP | TTGCTCGCTGCGGCGAGA | |
| hi32 | CGTCACAGCCCAAGATAG | |
| | TTA | |
| R3157_ | GCTGGGGACCGATCCTGA | 784 |
| CasP | TTGCTCGCTGCGGCGAGA | |
| hi32 | CTCACAGCCCAAGATAGT | |
| | TAA | |
| R3158_ | GCTGGGGACCGATCCTGA | 785 |
| CasP | TTGCTCGCTGCGGCGAGA | |
| hi32 | CACTATCTTGGGCTGTGA | |
| | CAA | |
| R3159_ | GCTGGGGACCGATCCTGA | 786 |
| CasP | TTGCTCGCTGCGGCGAGA | |
| hi32 | CCCCCACTTAACTATCTT | |
| | GGG | |

TABLE M
CasΦ.12 gRNAs targeting human
PDI in T cells

| | Spacer sequence | SEQ |
|---|---|---|
| | (5′ --> 3′), | ID |
| Name | shown as DNA | NO |
| R2921_ | CUUUCAAGACUAAUAGAU | 787 |
| CasP | UGCUCCUUACGAGGAG | |
| hi12 | ACCCUUCCGCUCACCUCC | |
| | GCCU | |
| R2922_ | CUUUCAAGACUAAUAGAU | 788 |
| CasP | UGCUCCUUACGAGGAG | |
| hi12 | ACCCUUCCGCUCACCUCC | |
| | GCCU | |
| R2923_ | CUUUCAAGACUAAUAGAU | 789 |
| CasP | UGCUCCUUACGAGGAG | |
| hi12 | ACCGCUCACCUCCGCCUG | |
| | AGCA | |
| R2924_ | CUUUCAAGACUAAUAGAU | 790 |
| CasP | UGCUCCUUACGAGGAG | |
| hi12 | ACUCCACUGCUCAGGCGG | |
| | AGGU | |
| R2925_ | CUUUCAAGACUAAUAGAU | 791 |
| CasP | UGCUCCUUACGAGGAG | |
| hi12 | ACUAGCACCGCCCAGACG | |
| | ACUG | |
| R2926_ | CUUUCAAGACUAAUAGAU | 792 |
| CasP | UGCUCCUUACGAGGAG | |
| hi12 | ACAGGCAUGCAGAUCCCA | |
| | CAGG | |
| R2927_ | CUUUCAAGACUAAUAGAU | 793 |
| CasP | UGCUCCUUACGAGGAG | |
| hi12 | ACCACAGGCGCCCUGGCC | |
| | AGUC | |
| R2928_ | CUUUCAAGACUAAUAGAU | 794 |
| CasP | UGCUCCUUACGAGGAG | |
| hi12 | ACUCUGGGCGGUGCUACA | |
| | ACUG | |
| R2929_ | CUUUCAAGACUAAUAGAU | 795 |
| CasP | UGCUCCUUACGAGGAG | |
| hi12 | ACGCAUGCCUGGAGCAGC | |
| | CCCA | |
| R2930_ | CUUUCAAGACUAAUAGAU | 796 |
| CasP | UGCUCCUUACGAGGAG | |
| hi12 | ACUAGCACCGCCCAGACG | |
| | ACUG | |
| R2931_ | CUUUCAAGACUAAUAGAU | 797 |
| CasP | UGCUCCUUACGAGGAG | |
| hi12 | ACUGGCCGCCAGCCCAGU | |
| | UGUA | |
| R2932_ | CUUUCAAGACUAAUAGAU | 798 |
| CasP | UGCUCCUUACGAGGAG | |
| hi12 | ACCUUCCGCUCACCUCCG | |
| | CCUG | |
| R2933_ | CUUUCAAGACUAAUAGAU | 799 |
| CasP | UGCUCCUUACGAGGAG | |
| hi12 | ACCAGGGCCUGUCUGGGG | |
| | AGUC | |
| R2934_ | CUUUCAAGACUAAUAGAU | 800 |
| CasP | UGCUCCUUACGAGGAG | |
| hi12 | ACUCCCCAGCCCUGCUCG | |
| | UGGU | |
| R2935_ | CUUUCAAGACUAAUAGAU | 801 |
| CasP | UGCUCCUUACGAGGAG | |
| hi12 | ACGGUCACCACGAGCAGG | |
| | GCUG | |
| R2936_ | CUUUCAAGACUAAUAGAU | 802 |
| CasP | UGCUCCUUACGAGGAG | |
| hi12 | ACUCCCCUUCGGUCACCA | |
| | CGAG | |
| R2937_ | CUUUCAAGACUAAUAGAU | 803 |
| CasP | UGCUCCUUACGAGGAG | |
| hi12 | ACGAGAAGCUGCAGGUGA | |
| | AGGU | |
| R2938_ | CUUUCAAGACUAAUAGAU | 804 |
| CasP | UGCUCCUUACGAGGAG | |
| hi12 | ACACCUGCAGCUUCUCCA | |
| | ACAC | |
| R2939_ | CUUUCAAGACUAAUAGAU | 805 |
| CasP | UGCUCCUUACGAGGAG | |
| hi12 | ACUCCAACACAUCGGAGA | |
| | GCUU | |
| R2940_ | CUUUCAAGACUAAUAGAU | 806 |
| CasP | UGCUCCUUACGAGGAG | |
| hi12 | ACGCACGAAGCUCUCCGA | |
| | UGUG | |
| R2941_ | CUUUCAAGACUAAUAGAU | 807 |
| CasP | UGCUCCUUACGAGGAG | |
| hi12 | ACAGCACGAAGCUCUCCG | |
| | AUGU | |
| R2942_ | CUUUCAAGACUAAUAGAU | 808 |
| CasP | UGCUCCUUACGAGGAG | |
| hi12 | ACGUGCUAAACUGGUACC | |
| | GCAU | |
| R2943_ | CUUUCAAGACUAAUAGAU | 809 |
| CasP | UGCUCCUUACGAGGAG | |
| hi12 | ACCUGGGGCUCAUGCGGU | |
| | ACCA | |
| R2944_ | CUUUCAAGACUAAUAGAU | 810 |
| CasP | UGCUCCUUACGAGGAG | |
| hi12 | ACUCCGUCUGGUUGCUGG | |
| | GGCU | |
| R2945_ | CUUUCAAGACUAAUAGAU | 811 |
| CasP | UGCUCCUUACGAGGAG | |
| hi12 | ACCCCGAGGACCGCAGCC | |
| | AGCC | |
| R2946_ | CUUUCAAGACUAAUAGAU | 812 |
| CasP | UGCUCCUUACGAGGAG | |
| hi12 | ACUGUGACACGGAAGCGG | |
| | CAGU | |
| R2947_ | CUUUCAAGACUAAUAGAU | 813 |
| CasP | UGCUCCUUACGAGGAG | |
| hi12 | ACCGUGUCACACAACUGC | |
| | CCAA | |
| R2948_ | CUUUCAAGACUAAUAGAU | 814 |
| CasP | UGCUCCUUACGAGGAG | |
| hi12 | ACGGCAGUUGUGUGACAC | |
| | GGAA | |
| R2949_ | CUUUCAAGACUAAUAGAU | 815 |
| CasP | UGCUCCUUACGAGGAG | |
| hi12 | ACCACAUGAGCGUGGUCA | |
| | GGGC | |
| R2950_ | CUUUCAAGACUAAUAGAU | 816 |
| CasP | UGCUCCUUACGAGGAG | |
| hi12 | ACCGCCGGGCCCUGACCA | |
| | CGCU | |
| R2951_ | CUUUCAAGACUAAUAGAU | 817 |
| CasP | UGCUCCUUACGAGGAG | |
| hi12 | ACGGGGCCAGGGAGAUGG | |
| | CCCC | |
| R2952_ | CUUUCAAGACUAAUAGAU | 818 |
| CasP | UGCUCCUUACGAGGAG | |
| hi12 | ACAUCUGCGCCUUGGGGG | |
| | CCAG | |
| R2953_ | CUUUCAAGACUAAUAGAU | 819 |
| CasP | UGCUCCUUACGAGGAG | |
| hi12 | ACGAUCUGCGCCUUGGGG | |
| | GCCA | |
| R2954_ | CUUUCAAGACUAAUAGAU | 820 |
| CasP | UGCUCCUUACGAGGAG | |
| hi12 | ACCCAGACAGGCCCUGGA | |
| | ACCC | |
| R2955_ | CUUUCAAGACUAAUAGAU | 821 |
| CasP | UGCUCCUUACGAGGAG | |
| hi12 | ACCCAGCCCUGCUCGUGG | |
| | UGAC | |
| R2956_ | CUUUCAAGACUAAUAGAU | 822 |
| CasP | UGCUCCUUACGAGGAG | |
| hi12 | ACUCUCUGGAAGGGCACA | |
| | AAGG | |
| R2957_ | CUUUCAAGACUAAUAGAU | 823 |
| CasP | UGCUCCUUACGAGGAG | |
| hi12 | ACGUGCCCUUCCAGAGAG | |
| | AAGG | |
| R2958_ | CUUUCAAGACUAAUAGAU | 824 |
| CasP | UGCUCCUUACGAGGAG | |
| hi12 | ACUGCCCUUCCAGAGAGA | |
| | AGGG | |
| R2959_ | CUUUCAAGACUAAUAGAU | 825 |
| CasP | UGCUCCUUACGAGGAG | |
| hi12 | ACUGCCCUUCUCUCUGGA | |
| | AGGG | |
| R2960_ | CUUUCAAGACUAAUAGAU | 826 |
| CasP | UGCUCCUUACGAGGAG | |
| hi12 | ACCAGAGAGAAGGGCAGA | |
| | AGUG | |
| R2961_ | CUUUCAAGACUAAUAGAU | 827 |
| CasP | UGCUCCUUACGAGGAG | |
| hi12 | ACGAACUGGCCGGCUGGC | |
| | CUGG | |
| R2962_ | CUUUCAAGACUAAUAGAU | 828 |
| CasP | UGCUCCUUACGAGGAG | |
| hi12 | ACGGAACUGGCCGGCUGG | |
| | CCUG | |
| R2963_ | CUUUCAAGACUAAUAGAU | 829 |
| CasP | UGCUCCUUACGAGGAG | |
| hi12 | ACCAAACCCUGGUGGUUG | |
| | GUGU | |
| R2964_ | CUUUCAAGACUAAUAGAU | 830 |
| CasP | UGCUCCUUACGAGGAG | |
| hi12 | ACGUGUCGUGGGCGGCCU | |
| | GCUG | |
| R2965_ | CUUUCAAGACUAAUAGAU | 831 |
| CasP | UGCUCCUUACGAGGAG | |
| hi12 | ACCCUCGUGCGGCCCGGG | |
| | AGCA | |
| R2966_ | CUUUCAAGACUAAUAGAU | 832 |
| CasP | UGCUCCUUACGAGGAG | |
| hi12 | ACUCCCUGCAGAGAAACA | |
| | CACU | |
| R2967_ | CUUUCAAGACUAAUAGAU | 833 |
| CasP | UGCUCCUUACGAGGAG | |
| hi12 | ACCUCUGCAGGGACAAUA | |
| | GGAG | |
| R2968_ | CUUUCAAGACUAAUAGAU | 834 |
| CasP | UGCUCCUUACGAGGAG | |
| hi12 | ACUCUGCAGGGACAAUAG | |
| | GAGC | |
| R2969_ | CUUUCAAGACUAAUAGAU | 835 |
| CasP | UGCUCCUUACGAGGAG | |
| hi12 | ACCUCCUCAAAGAAGGAG | |
| | GACC | |
| R2970_ | CUUUCAAGACUAAUAGAU | 836 |
| CasP | UGCUCCUUACGAGGAG | |
| hi12 | ACUCCUCAAAGAAGGAGG | |
| | ACCC | |
| R2971_ | CUUUCAAGACUAAUAGAU | 837 |
| CasP | UGCUCCUUACGAGGAG | |
| hi12 | ACUCUGUGGACUAUGGGG | |
| | AGCU | |
| R2972_ | CUUUCAAGACUAAUAGAU | 838 |
| CasP | UGCUCCUUACGAGGAG | |
| hi12 | ACUCUCGCCACUGGAAAU | |
| | CCAG | |
| R2973_ | CUUUCAAGACUAAUAGAU | 839 |
| CasP | UGCUCCUUACGAGGAG | |
| hi12 | ACCCAGUGGCGAGAGAAG | |
| | ACCC | |
| R2974_ | CUUUCAAGACUAAUAGAU | 840 |
| CasP | UGCUCCUUACGAGGAG | |
| hi12 | ACCAGUGGCGAGAGAAGA | |
| | CCCC | |
| R2975_ | CUUUCAAGACUAAUAGAU | 841 |
| CasP | UGCUCCUUACGAGGAG | |
| hi12 | ACCGCUAGGAAAGACAAU | |
| | GGUG | |
| R2976_ | CUUUCAAGACUAAUAGAU | 842 |
| CasP | UGCUCCUUACGAGGAG | |
| hi12 | ACUCUUUCCUAGCGGAAU | |
| | GGGC | |
| R2977_ | CUUUCAAGACUAAUAGAU | 843 |
| CasP | UGCUCCUUACGAGGAG | |
| hi12 | ACCCUAGCGGAAUGGGCA | |
| | CCUC | |
| R2978_ | CUUUCAAGACUAAUAGAU | 844 |
| CasP | UGCUCCUUACGAGGAG | |
| hi12 | ACCUAGCGGAAUGGGCAC | |
| | CUCA | |
| R2979_ | CUUUCAAGACUAAUAGAU | 845 |
| CasP | UGCUCCUUACGAGGAG | |
| hi12 | ACGCCCCUCUGACCGGCU | |
| | UCCU | |
| R2980_ | CUUUCAAGACUAAUAGAU | 846 |
| CasP | UGCUCCUUACGAGGAG | |
| hi12 | ACCUUGGCCACCAGUGUU | |
| | CUGC | |
| R2981_ | CUUUCAAGACUAAUAGAU | 847 |
| CasP | UGCUCCUUACGAGGAG | |
| hi12 | ACGCCACCAGUGUUCUGC | |
| | AGAC | |
| R2982_ | CUUUCAAGACUAAUAGAU | 848 |
| CasP | UGCUCCUUACGAGGAG | |
| hi12 | ACUGCAGACCCUCCACCA | |
| | UGAG | |
| R2983_ | CUUUCAAGACUAAUAGAU | 849 |
| CasP | UGCUCCUUACGAGGAG | |
| hi12 | ACUCCUGAGGAAAUGCGC | |
| | UGAC | |
| R2984_ | CUUUCAAGACUAAUAGAU | 850 |
| CasP | UGCUCCUUACGAGGAG | |
| hi12 | ACCCUCAGGAGAAGCAGG | |
| | CAGG | |
| R2985_ | CUUUCAAGACUAAUAGAU | 851 |
| CasP | UGCUCCUUACGAGGAG | |
| hi12 | ACCUCAGGAGAAGCAGGC | |
| | AGGG | |
| R2986_ | CUUUCAAGACUAAUAGAU | 852 |
| CasP | UGCUCCUUACGAGGAG | |
| hi12 | ACCAGGCCGUCCAGGGGC | |
| | UGAG | |
| R2987_ | CUUUCAAGACUAAUAGAU | 853 |
| CasP | UGCUCCUUACGAGGAG | |
| hi12 | ACAGACAUGAGUCCUGUG | |
| | GUGG | |
| R2988_ | CUUUCAAGACUAAUAGAU | 854 |
| CasP | UGCUCCUUACGAGGAG | |
| hi12 | ACAGGUCCUGCCAGCACA | |
| | GAGC | |
| R2989_ | CUUUCAAGACUAAUAGAU | 855 |
| CasP | UGCUCCUUACGAGGAG | |
| hi12 | ACAGGGAGCUGGACGCAG | |
| | GCAG | |
| R2990_ | CUUUCAAGACUAAUAGAU | 856 |
| CasP | UGCUCCUUACGAGGAG | |
| hi12 | ACAGCCCCGGGCCGCAGG | |
| | CAGC | |
| R2991_ | CUUUCAAGACUAAUAGAU | 857 |
| CasP | UGCUCCUUACGAGGAG | |
| hi12 | ACAGGCAGGAGGCUCCGG | |
| | GGCG | |
| R2992_ | CUUUCAAGACUAAUAGAU | 858 |
| CasP | UGCUCCUUACGAGGAG | |
| hi12 | ACGGGGCUGGUUGGAGAU | |
| | GGCC | |
| R2993_ | CUUUCAAGACUAAUAGAU | 859 |
| CasP | UGCUCCUUACGAGGAG | |
| hi12 | ACGAGAUGGCCUUGGAGC | |
| | AGCC | |
| R2994_ | CUUUCAAGACUAAUAGAU | 860 |
| CasP | UGCUCCUUACGAGGAG | |
| hi12 | ACGCUGCUCCAAGGCCAU | |
| | CUCC | |
| R2995_ | CUUUCAAGACUAAUAGAU | 861 |
| CasP | UGCUCCUUACGAGGAG | |
| hi12 | ACGAGCAGCCAAGGUGCC | |
| | CCUG | |
| R2996_ | CUUUCAAGACUAAUAGAU | 862 |
| CasP | UGCUCCUUACGAGGAG | |
| hi12 | ACGGGAUGCCACUGCCAG | |
| | GGGC | |
| R2997_ | CUUUCAAGACUAAUAGAU | 863 |
| CasP | UGCUCCUUACGAGGAG | |
| hi12 | ACCGGGAUGCCACUGCCA | |
| | GGGG | |
| R2998_ | CUUUCAAGACUAAUAGAU | 864 |
| CasP | UGCUCCUUACGAGGAG | |
| hi12 | ACGGCCCUGCGUCCAGGG | |
| | CGUU | |
| R2999_ | CUUUCAAGACUAAUAGAU | 865 |
| CasP | UGCUCCUUACGAGGAG | |
| hi12 | ACUCUGCUCCCUGCAGGC | |
| | CUAG | |
| R3000_ | CUUUCAAGACUAAUAGAU | 866 |
| CasP | UGCUCCUUACGAGGAG | |
| hi12 | ACUCUAGGCCUGCAGGGA | |
| | GCAG | |
| R3001_ | CUUUCAAGACUAAUAGAU | 867 |
| CasP | UGCUCCUUACGAGGAG | |
| hi12 | ACCCUGAAACUUCUCUAG | |
| | GCCU | |
| R3002_ | CUUUCAAGACUAAUAGAU | 868 |
| CasP | UGCUCCUUACGAGGAG | |
| hi12 | ACUGACCUUCCCUGAAAC | |
| | UUCU | |
| R3003_ | CUUUCAAGACUAAUAGAU | 869 |
| CasP | UGCUCCUUACGAGGAG | |
| hi12 | ACCAGGGAAGGUCAGAAG | |
| | AGCU | |
| R3004_ | CUUUCAAGACUAAUAGAU | 870 |
| CasP | UGCUCCUUACGAGGAG | |
| hi12 | ACAGGGAAGGUCAGAAGA | |
| | GCUC | |
| R3005_ | CUUUCAAGACUAAUAGAU | 871 |
| CasP | UGCUCCUUACGAGGAG | |
| hi12 | ACCUGCCCUGCCCACCAC | |
| | AGCC | |
| R3006_ | CUUUCAAGACUAAUAGAU | 872 |
| CasP | UGCUCCUUACGAGGAG | |
| hi12 | ACCCUGCCCUGCCCACCA | |
| | CAGC | |
| R3007_ | CUUUCAAGACUAAUAGAU | 873 |
| CasP | UGCUCCUUACGAGGAG | |
| hi12 | ACACACAUGCCCAGGCAG | |
| | CACC | |
| R3008_ | CUUUCAAGACUAAUAGAU | 874 |
| CasP | UGCUCCUUACGAGGAG | |
| hi12 | ACCACAUGCCCAGGCAGC | |
| | ACCU | |
| R3009_ | CUUUCAAGACUAAUAGAU | 875 |
| CasP | UGCUCCUUACGAGGAG | |
| hi12 | ACCCUGCCCCACAAAGGG | |
| | CCUG | |
| R3010_ | CUUUCAAGACUAAUAGAU | 876 |
| CasP | UGCUCCUUACGAGGAG | |
| hi12 | ACGUGGGGCAGGGAAGCU | |
| | GAGG | |
| R3011_ | CUUUCAAGACUAAUAGAU | 877 |
| CasP | UGCUCCUUACGAGGAG | |
| hi12 | ACUGGGGCAGGGAAGCUG | |
| | AGGC | |
| R3012_ | CUUUCAAGACUAAUAGAU | 878 |
| CasP | UGCUCCUUACGAGGAG | |
| hi12 | ACCUGCCUCAGCUUCCCU | |
| | GCCC | |
| R3013_ | CUUUCAAGACUAAUAGAU | 879 |
| CasP | UGCUCCUUACGAGGAG | |
| hi12 | ACCAGGCCCAGCCAGCAC | |
| | UCUG | |
| R3014_ | CUUUCAAGACUAAUAGAU | 880 |
| CasP | UGCUCCUUACGAGGAG | |
| hi12 | ACAGGCCCAGCCAGCACU | |
| | CUGG | |
| R3015_ | CUUUCAAGACUAAUAGAU | 881 |
| CasP | UGCUCCUUACGAGGAG | |
| hi12 | ACCACCCCAGCCCCUCAC | |
| | ACCA | |
| R3016_ | CUUUCAAGACUAAUAGAU | 882 |
| CasP | UGCUCCUUACGAGGAG | |
| hi12 | ACGGACCGUAGGAUGUCC | |
| | CUCU | |

TABLE N
CasΦ.32 gRNAs targeting human PD1 in T cells

| Name | Repeat + spacer RNA Sequence (5′→3′) | SEQ ID NO |
|---|---|---|
| R2921_ | GCUGGGGACCGAUCCUGAUUGCUCGCUGCGGCGA | 883 |
| CasPhi32 | GACCCUUCCGCUCACCUCCGCCU | |
| R2922_ | GCUGGGGACCGAUCCUGAUUGCUCGCUGCGGCGA | 884 |
| CasPhi32 | GACCCUUCCGCUCACCUCCGCCU | |
| R2923_ | GCUGGGGACCGAUCCUGAUUGCUCGCUGCGGCGA | 885 |
| CasPhi32 | GACCGCUCACCUCCGCCUGAGCA | |
| R2924_ | GCUGGGGACCGAUCCUGAUUGCUCGCUGCGGCGA | 886 |
| CasPhi32 | GACUCCACUGCUCAGGCGGAGGU | |
| R2925_ | GCUGGGGACCGAUCCUGAUUGCUCGCUGCGGCGA | 887 |
| CasPhi32 | GACUAGCACCGCCCAGACGACUG | |
| R2926_ | GCUGGGGACCGAUCCUGAUUGCUCGCUGCGGCGA | 888 |
| CasPhi32 | GACAGGCAUGCAGAUCCCACAGG | |
| R2927_ | GCUGGGGACCGAUCCUGAUUGCUCGCUGCGGCGA | 889 |
| CasPhi32 | GACCACAGGCGCCCUGGCCAGUC | |
| R2928_ | GCUGGGGACCGAUCCUGAUUGCUCGCUGCGGCGA | 890 |
| CasPhi32 | GACUCUGGGCGGUGCUACAACUG | |
| R2929_ | GCUGGGGACCGAUCCUGAUUGCUCGCUGCGGCGA | 891 |
| CasPhi32 | GACGCAUGCCUGGAGCAGCCCCA | |
| R2930_ | GCUGGGGACCGAUCCUGAUUGCUCGCUGCGGCGA | 892 |
| CasPhi32 | GACUAGCACCGCCCAGACGACUG | |
| R2931_ | GCUGGGGACCGAUCCUGAUUGCUCGCUGCGGCGA | 893 |
| CasPhi32 | GACUGGCCGCCAGCCCAGUUGUA | |
| R2932_ | GCUGGGGACCGAUCCUGAUUGCUCGCUGCGGCGA | 894 |
| CasPhi32 | GACCUUCCGCUCACCUCCGCCUG | |
| R2933_ | GCUGGGGACCGAUCCUGAUUGCUCGCUGCGGCGA | 895 |
| CasPhi32 | GACCAGGGCCUGUCUGGGGAGUC | |
| R2934_ | GCUGGGGACCGAUCCUGAUUGCUCGCUGCGGCGA | 896 |
| CasPhi32 | GACUCCCCAGCCCUGCUCGUGGU | |
| R2935_ | GCUGGGGACCGAUCCUGAUUGCUCGCUGCGGCGA | 897 |
| CasPhi32 | GACGGUCACCACGAGCAGGGCUG | |
| R2936_ | GCUGGGGACCGAUCCUGAUUGCUCGCUGCGGCGA | 898 |
| CasPhi32 | GACUCCCCUUCGGUCACCACGAG | |
| R2937_ | GCUGGGGACCGAUCCUGAUUGCUCGCUGCGGCGA | 899 |
| CasPhi32 | GACGAGAAGCUGCAGGUGAAGGU | |
| R2938_ | GCUGGGGACCGAUCCUGAUUGCUCGCUGCGGCGA | 900 |
| CasPhi32 | GACACCUGCAGCUUCUCCAACAC | |
| R2939_ | GCUGGGGACCGAUCCUGAUUGCUCGCUGCGGCGA | 901 |
| CasPhi32 | GACUCCAACACAUCGGAGAGCUU | |
| R2940_ | GCUGGGGACCGAUCCUGAUUGCUCGCUGCGGCGA | 902 |
| CasPhi32 | GACGCACGAAGCUCUCCGAUGUG | |
| R2941_ | GCUGGGGACCGAUCCUGAUUGCUCGCUGCGGCGA | 903 |
| CasPhi32 | GACAGCACGAAGCUCUCCGAUGU | |
| R2942_ | GCUGGGGACCGAUCCUGAUUGCUCGCUGCGGCGA | 904 |
| CasPhi32 | GACGUGCUAAACUGGUACCGCAU | |
| R2943_ | GCUGGGGACCGAUCCUGAUUGCUCGCUGCGGCGA | 905 |
| CasPhi32 | GACCUGGGGCUCAUGCGGUACCA | |
| R2944_ | GCUGGGGACCGAUCCUGAUUGCUCGCUGCGGCGA | 906 |
| CasPhi32 | GACUCCGUCUGGUUGCUGGGGCU | |
| R2945_ | GCUGGGGACCGAUCCUGAUUGCUCGCUGCGGCGA | 907 |
| CasPhi32 | GACCCCGAGGACCGCAGCCAGCC | |
| R2946_ | GCUGGGGACCGAUCCUGAUUGCUCGCUGCGGCGA | 908 |
| CasPhi32 | GACUGUGACACGGAAGCGGCAGU | |
| R2947_ | GCUGGGGACCGAUCCUGAUUGCUCGCUGCGGCGA | 909 |
| CasPhi32 | GACCGUGUCACACAACUGCCCAA | |
| R2948_ | GCUGGGGACCGAUCCUGAUUGCUCGCUGCGGCGA | 910 |
| CasPhi32 | GACGGCAGUUGUGUGACACGGAA | |
| R2949_ | GCUGGGGACCGAUCCUGAUUGCUCGCUGCGGCGA | 911 |
| CasPhi32 | GACCACAUGAGCGUGGUCAGGGC | |
| R2950_ | GCUGGGGACCGAUCCUGAUUGCUCGCUGCGGCGA | 912 |
| CasPhi32 | GACCGCCGGGCCCUGACCACGCU | |
| R2951_ | GCUGGGGACCGAUCCUGAUUGCUCGCUGCGGCGA | 913 |
| CasPhi32 | GACGGGGCCAGGGAGAUGGCCCC | |
| R2952_ | GCUGGGGACCGAUCCUGAUUGCUCGCUGCGGCGA | 914 |
| CasPhi32 | GACAUCUGCGCCUUGGGGGCCAG | |
| R2953_ | GCUGGGGACCGAUCCUGAUUGCUCGCUGCGGCGA | 915 |
| CasPhi32 | GACGAUCUGCGCCUUGGGGGCCA | |
| R2954_ | GCUGGGGACCGAUCCUGAUUGCUCGCUGCGGCGA | 916 |
| CasPhi32 | GACCCAGACAGGCCCUGGAACCC | |
| R2955_ | GCUGGGGACCGAUCCUGAUUGCUCGCUGCGGCGA | 917 |
| CasPhi32 | GACCCAGCCCUGCUCGUGGUGAC | |
| R2956_ | GCUGGGGACCGAUCCUGAUUGCUCGCUGCGGCGA | 918 |
| CasPhi32 | GACUCUCUGGAAGGGCACAAAGG | |
| R2957_ | GCUGGGGACCGAUCCUGAUUGCUCGCUGCGGCGA | 919 |
| CasPhi32 | GACGUGCCCUUCCAGAGAGAAGG | |
| R2958_ | GCUGGGGACCGAUCCUGAUUGCUCGCUGCGGCGA | 920 |
| CasPhi32 | GACUGCCCUUCCAGAGAGAAGGG | |
| R2959_ | GCUGGGGACCGAUCCUGAUUGCUCGCUGCGGCGA | 921 |
| CasPhi32 | GACUGCCCUUCUCUCUGGAAGGG | |
| R2960_ | GCUGGGGACCGAUCCUGAUUGCUCGCUGCGGCGA | 922 |
| CasPhi32 | GACCAGAGAGAAGGGCAGAAGUG | |
| R2961_ | GCUGGGGACCGAUCCUGAUUGCUCGCUGCGGCGA | 923 |
| CasPhi32 | GACGAACUGGCCGGCUGGCCUGG | |
| R2962_ | GCUGGGGACCGAUCCUGAUUGCUCGCUGCGGCGA | 924 |
| CasPhi32 | GACGGAACUGGCCGGCUGGCCUG | |
| R2963_ | GCUGGGGACCGAUCCUGAUUGCUCGCUGCGGCGA | 925 |
| CasPhi32 | GACCAAACCCUGGUGGUUGGUGU | |
| R2964_ | GCUGGGGACCGAUCCUGAUUGCUCGCUGCGGCGA | 926 |
| CasPhi32 | GACGUGUCGUGGGCGGCCUGCUG | |
| R2965_ | GCUGGGGACCGAUCCUGAUUGCUCGCUGCGGCGA | 927 |
| CasPhi32 | GACCCUCGUGCGGCCCGGGAGCA | |
| R2966_ | GCUGGGGACCGAUCCUGAUUGCUCGCUGCGGCGA | 928 |
| CasPhi32 | GACUCCCUGCAGAGAAACACACU | |
| R2967_ | GCUGGGGACCGAUCCUGAUUGCUCGCUGCGGCGA | 929 |
| CasPhi32 | GACCUCUGCAGGGACAAUAGGAG | |
| R2968_ | GCUGGGGACCGAUCCUGAUUGCUCGCUGCGGCGA | 930 |
| CasPhi32 | GACUCUGCAGGGACAAUAGGAGC | |
| R2969_ | GCUGGGGACCGAUCCUGAUUGCUCGCUGCGGCGA | 931 |
| CasPhi32 | GACCUCCUCAAAGAAGGAGGACC | |
| R2970_ | GCUGGGGACCGAUCCUGAUUGCUCGCUGCGGCGA | 932 |
| CasPhi32 | GACUCCUCAAAGAAGGAGGACCC | |
| R2971_ | GCUGGGGACCGAUCCUGAUUGCUCGCUGCGGCGA | 933 |
| CasPhi32 | GACUCUGUGGACUAUGGGGAGCU | |
| R2972_ | GCUGGGGACCGAUCCUGAUUGCUCGCUGCGGCGA | 934 |
| CasPhi32 | GACUCUCGCCACUGGAAAUCCAG | |
| R2973_ | GCUGGGGACCGAUCCUGAUUGCUCGCUGCGGCGA | 935 |
| CasPhi32 | GACCCAGUGGCGAGAGAAGACCC | |
| R2974_ | GCUGGGGACCGAUCCUGAUUGCUCGCUGCGGCGA | 936 |
| CasPhi32 | GACCAGUGGCGAGAGAAGACCCC | |
| R2975_ | GCUGGGGACCGAUCCUGAUUGCUCGCUGCGGCGA | 937 |
| CasPhi32 | GACCGCUAGGAAAGACAAUGGUG | |
| R2976_ | GCUGGGGACCGAUCCUGAUUGCUCGCUGCGGCGA | 938 |
| CasPhi32 | GACUCUUUCCUAGCGGAAUGGGC | |
| R2977_ | GCUGGGGACCGAUCCUGAUUGCUCGCUGCGGCGA | 939 |
| CasPhi32 | GACCCUAGCGGAAUGGGCACCUC | |
| R2978_ | GCUGGGGACCGAUCCUGAUUGCUCGCUGCGGCGA | 940 |
| CasPhi32 | GACCUAGCGGAAUGGGCACCUCA | |
| R2979_ | GCUGGGGACCGAUCCUGAUUGCUCGCUGCGGCGA | 941 |
| CasPhi32 | GACGCCCCUCUGACCGGCUUCCU | |
| R2980_ | GCUGGGGACCGAUCCUGAUUGCUCGCUGCGGCGA | 942 |
| CasPhi32 | GACCUUGGCCACCAGUGUUCUGC | |
| R2981_ | GCUGGGGACCGAUCCUGAUUGCUCGCUGCGGCGA | 943 |
| CasPhi32 | GACGCCACCAGUGUUCUGCAGAC | |
| R2982_ | GCUGGGGACCGAUCCUGAUUGCUCGCUGCGGCGA | 944 |
| CasPhi32 | GACUGCAGACCCUCCACCAUGAG | |
| R2983_ | GCUGGGGACCGAUCCUGAUUGCUCGCUGCGGCGA | 945 |
| CasPhi32 | GACUCCUGAGGAAAUGCGCUGAC | |
| R2984_ | GCUGGGGACCGAUCCUGAUUGCUCGCUGCGGCGA | 946 |
| CasPhi32 | GACCCUCAGGAGAAGCAGGCAGG | |
| R2985_ | GCUGGGGACCGAUCCUGAUUGCUCGCUGCGGCGA | 947 |
| CasPhi32 | GACCUCAGGAGAAGCAGGCAGGG | |
| R2986_ | GCUGGGGACCGAUCCUGAUUGCUCGCUGCGGCGA | 948 |
| CasPhi32 | GACCAGGCCGUCCAGGGGCUGAG | |
| R2987_ | GCUGGGGACCGAUCCUGAUUGCUCGCUGCGGCGA | 949 |
| CasPhi32 | GACAGACAUGAGUCCUGUGGUGG | |
| R2988_ | GCUGGGGACCGAUCCUGAUUGCUCGCUGCGGCGA | 950 |
| CasPhi32 | GACAGGUCCUGCCAGCACAGAGC | |
| R2989_ | GCUGGGGACCGAUCCUGAUUGCUCGCUGCGGCGA | 951 |
| CasPhi32 | GACAGGGAGCUGGACGCAGGCAG | |
| R2990_ | GCUGGGGACCGAUCCUGAUUGCUCGCUGCGGCGA | 952 |
| CasPhi32 | GACAGCCCCGGGCCGCAGGCAGC | |
| R2991_ | GCUGGGGACCGAUCCUGAUUGCUCGCUGCGGCGA | 953 |
| CasPhi32 | GACAGGCAGGAGGCUCCGGGGCG | |
| R2992_ | GCUGGGGACCGAUCCUGAUUGCUCGCUGCGGCGA | 954 |
| CasPhi32 | GACGGGGCUGGUUGGAGAUGGCC | |
| R2993_ | GCUGGGGACCGAUCCUGAUUGCUCGCUGCGGCGA | 955 |
| CasPhi32 | GACGAGAUGGCCUUGGAGCAGCC | |
| R2994_ | GCUGGGGACCGAUCCUGAUUGCUCGCUGCGGCGA | 956 |
| CasPhi32 | GACGCUGCUCCAAGGCCAUCUCC | |
| R2995_ | GCUGGGGACCGAUCCUGAUUGCUCGCUGCGGCGA | 957 |
| CasPhi32 | GACGAGCAGCCAAGGUGCCCCUG | |
| R2996_ | GCUGGGGACCGAUCCUGAUUGCUCGCUGCGGCGA | 958 |
| CasPhi32 | GACGGGAUGCCACUGCCAGGGGC | |
| R2997_ | GCUGGGGACCGAUCCUGAUUGCUCGCUGCGGCGA | 959 |
| CasPhi32 | GACCGGGAUGCCACUGCCAGGGG | |
| R2998_ | GCUGGGGACCGAUCCUGAUUGCUCGCUGCGGCGA | 960 |
| CasPhi32 | GACGGCCCUGCGUCCAGGGCGUU | |
| R2999_ | GCUGGGGACCGAUCCUGAUUGCUCGCUGCGGCGA | 961 |
| CasPhi32 | GACUCUGCUCCCUGCAGGCCUAG | |
| R3000_ | GCUGGGGACCGAUCCUGAUUGCUCGCUGCGGCGA | 962 |
| CasPhi32 | GACUCUAGGCCUGCAGGGAGCAG | |
| R3001_ | GCUGGGGACCGAUCCUGAUUGCUCGCUGCGGCGA | 963 |
| CasPhi32 | GACCCUGAAACUUCUCUAGGCCU | |
| R3002_ | GCUGGGGACCGAUCCUGAUUGCUCGCUGCGGCGA | 964 |
| CasPhi32 | GACUGACCUUCCCUGAAACUUCU | |
| R3003_ | GCUGGGGACCGAUCCUGAUUGCUCGCUGCGGCGA | 965 |
| CasPhi32 | GACCAGGGAAGGUCAGAAGAGCU | |
| R3004_ | GCUGGGGACCGAUCCUGAUUGCUCGCUGCGGCGA | 966 |
| CasPhi32 | GACAGGGAAGGUCAGAAGAGCUC | |
| R3005_ | GCUGGGGACCGAUCCUGAUUGCUCGCUGCGGCGA | 967 |
| CasPhi32 | GACCUGCCCUGCCCACCACAGCC | |
| R3006_ | GCUGGGGACCGAUCCUGAUUGCUCGCUGCGGCGA | 968 |
| CasPhi32 | GACCCUGCCCUGCCCACCACAGC | |
| R3007_ | GCUGGGGACCGAUCCUGAUUGCUCGCUGCGGCGA | 969 |
| CasPhi32 | GACACACAUGCCCAGGCAGCACC | |
| R3008_ | GCUGGGGACCGAUCCUGAUUGCUCGCUGCGGCGA | 970 |
| CasPhi32 | GACCACAUGCCCAGGCAGCACCU | |
| R3009_ | GCUGGGGACCGAUCCUGAUUGCUCGCUGCGGCGA | 971 |
| CasPhi32 | GACCCUGCCCCACAAAGGGCCUG | |
| R3010_ | GCUGGGGACCGAUCCUGAUUGCUCGCUGCGGCGA | 972 |
| CasPhi32 | GACGUGGGGCAGGGAAGCUGAGG | |
| R3011_ | GCUGGGGACCGAUCCUGAUUGCUCGCUGCGGCGA | 973 |
| CasPhi32 | GACUGGGGCAGGGAAGCUGAGGC | |
| R3012_ | GCUGGGGACCGAUCCUGAUUGCUCGCUGCGGCGA | 974 |
| CasPhi32 | GACCUGCCUCAGCUUCCCUGCCC | |
| R3013_ | GCUGGGGACCGAUCCUGAUUGCUCGCUGCGGCGA | 975 |
| CasPhi32 | GACCAGGCCCAGCCAGCACUCUG | |
| R3014_ | GCUGGGGACCGAUCCUGAUUGCUCGCUGCGGCGA | 976 |
| CasPhi32 | GACAGGCCCAGCCAGCACUCUGG | |
| R3015_ | GCUGGGGACCGAUCCUGAUUGCUCGCUGCGGCGA | 977 |
| CasPhi32 | GACCACCCCAGCCCCUCACACCA | |
| R3016_ | GCUGGGGACCGAUCCUGAUUGCUCGCUGCGGCGA | 978 |
| CasPhi32 | GACGGACCGUAGGAUGUCCCUCU | |

TABLE O
CasΦ.12 gRNAs targeting human CIITA

| | Repeat + | |
|---|---|---|
| Name | spacer sequence RNA Sequence (5′→3′) | SEQ ID NO |
| R4503_CasPhi12_ | CUUUCAAGACUAAUAGAUUGCUCCUUACGAGG | 979 |
| C2TA_T1.1 | AGACCUACACAAUGCGUUGCCUGG | |
| R4504_CasPhi12_ | CUUUCAAGACUAAUAGAUUGCUCCUUACGAGG | 980 |
| C2TA_T1.2 | AGACGGGCUCUGACAGGUAGGACC | |
| R4505_CasPhi12_ | CUUUCAAGACUAAUAGAUUGCUCCUUACGAGG | 981 |
| C2TA_T1.3 | AGACUGUAGGAAUCCCAGCCAGGC | |
| R4506_CasPhi12_ | CUUUCAAGACUAAUAGAUUGCUCCUUACGAGG | 982 |
| C2TA_T1.8 | AGACCCUGGCUCCACGCCCUGCUG | |
| R4507_CasPhi12_ | CUUUCAAGACUAAUAGAUUGCUCCUUACGAGG | 983 |
| C2TA_T1.9 | AGACGGGAAGCUGAGGGCACGAGG | |
| R4508_CasPhi12_ | CUUUCAAGACUAAUAGAUUGCUCCUUACGAGG | 984 |
| C2TA_T2.1 | AGACACAGCGAUGCUGACCCCCUG | |
| R4509_CasPhi12_ | CUUUCAAGACUAAUAGAUUGCUCCUUACGAGG | 985 |
| C2_TAT2.2 | AGACUUAACAGCGAUGCUGACCCC | |
| R4510_CasPhi12_ | CUUUCAAGACUAAUAGAUUGCUCCUUACGAGG | 986 |
| C2TA_T2.3 | AGACUAUGACCAGAUGGACCUGGC | |
| R4511_CasPhi12_ | CUUUCAAGACUAAUAGAUUGCUCCUUACGAGG | 987 |
| C2TA_T2.4 | AGACGGGCCCCUAGAAGGUGGCUA | |
| R4512_CasPhi12_ | CUUUCAAGACUAAUAGAUUGCUCCUUACGAGG | 988 |
| C2TA_T2.5 | AGACUAGGGGCCCCAACUCCAUGG | |
| R4513_CasPhi12_ | CUUUCAAGACUAAUAGAUUGCUCCUUACGAGG | 989 |
| C2TA_T2.6 | AGACAGAAGCUCCAGGUAGCCACC | |
| R4514_CasPhi12 | CUUUCAAGACUAAUAGAUUGCUCCUUACGAGG | 990 |
| C2TA_T2.7 | AGACUCCAGCCAGGUCCAUCUGGU | |
| R4515_CasPhi12_ | CUUUCAAGACUAAUAGAUUGCUCCUUACGAGG | 991 |
| C2TA_T2.8 | AGACUUCUCCAGCCAGGUCCAUCU | |
| R5200_CasPhi12 | CUUUCAAGACUAAUAGAUUGCUCCUUACGAGG | 2112 |
| | AGACAGCAGGCUGUUGUGUGACAU | |
| R5201_CasPhi12 | CUUUCAAGACUAAUAGAUUGCUCCUUACGAGG | 2113 |
| | AGACCAUGUCACACAACAGCCUGC | |
| R5202_CasPhi12 | CUUUCAAGACUAAUAGAUUGCUCCUUACGAGG | 2114 |
| | AGACUGUGACAUGGAAGGUGAUGA | |
| R5203_CasPhi12 | CUUUCAAGACUAAUAGAUUGCUCCUUACGAGG | 2115 |
| | AGACAUCACCUUCCAUGUCACACA | |
| R5204_CasPhi12 | CUUUCAAGACUAAUAGAUUGCUCCUUACGAGG | 2116 |
| | AGACGCAUAAGCCUCCCUGGUCUC | |
| R5205_CasPhi12 | CUUUCAAGACUAAUAGAUUGCUCCUUACGAGG | 2117 |
| | AGACCAGGACUCCCAGCUGGAGGG | |
| R5206_CasPhi12 | CUUUCAAGACUAAUAGAUUGCUCCUUACGAGG | 2118 |
| | AGACCUCAGGCCCUCCAGCUGGGA | |
| R5207_CasPhi12 | CUUUCAAGACUAAUAGAUUGCUCCUUACGAGG | 2119 |
| | AGACUGCUGGCAUCUCCAUACUCU | |
| R5208_CasPhi12 | CUUUCAAGACUAAUAGAUUGCUCCUUACGAGG | 2120 |
| | AGACUGCCCAACUUCUGCUGGCAU | |
| R5209_CasPhi12 | CUUUCAAGACUAAUAGAUUGCUCCUUACGAGG | 2121 |
| | AGACCUGCCCAACUUCUGCUGGCA | |
| R5210_CasPhi12 | CUUUCAAGACUAAUAGAUUGCUCCUUACGAGG | 2122 |
| | AGACUCUGCCCAACUUCUGCUGGC | |
| R5211_CasPhi12 | CUUUCAAGACUAAUAGAUUGCUCCUUACGAGG | 2123 |
| | AGACUGACUUUUCUGCCCAACUUC | |
| R5212_CasPhi12 | CUUUCAAGACUAAUAGAUUGCUCCUUACGAGG | 2124 |
| | AGACCUGACUUUUCUGCCCAACUU | |
| R5213_CasPhi12 | CUUUCAAGACUAAUAGAUUGCUCCUUACGAGG | 2125 |
| | AGACUCUGACUUUUCUGCCCAACU | |
| R5214_CasPhi12 | CUUUCAAGACUAAUAGAUUGCUCCUUACGAGG | 2126 |
| | AGACCCAGAGGAGCUUCCGGCAGA | |
| R5215_CasPhi12 | CUUUCAAGACUAAUAGAUUGCUCCUUACGAGG | 2127 |
| | AGACAGGUCUGCCGGAAGCUCCUC | |
| R5216_CasPhi12 | CUUUCAAGACUAAUAGAUUGCUCCUUACGAGG | 2128 |
| | AGACCGGCAGACCUGAAGCACUGG | |
| R5217_CasPhi12 | CUUUCAAGACUAAUAGAUUGCUCCUUACGAGG | 2129 |
| | AGACCAGUGCUUCAGGUCUGCCGG | |
| R5218_CasPhi12 | CUUUCAAGACUAAUAGAUUGCUCCUUACGAGG | 2130 |
| | AGACAACAGCGCAGGCAGUGGCAG | |
| R5219_CasPhi12 | CUUUCAAGACUAAUAGAUUGCUCCUUACGAGG | 2131 |
| | AGACAACCAGGAGCCAGCCUCCGG | |
| R5220_CasPhi12 | CUUUCAAGACUAAUAGAUUGCUCCUUACGAGG | 2132 |
| | AGACUCCAGGCGCAUCUGGCCGGA | |
| R5221_CasPhi12 | CUUUCAAGACUAAUAGAUUGCUCCUUACGAGG | 2133 |
| | AGACCUCCAGGCGCAUCUGGCCGG | |
| R5222_CasPhi12 | CUUUCAAGACUAAUAGAUUGCUCCUUACGAGG | 2134 |
| | AGACUCUCCAGGCGCAUCUGGCCG | |
| R5223_CasPhi12 | CUUUCAAGACUAAUAGAUUGCUCCUUACGAGG | 2135 |
| | AGACCUCCAGUUCCUCGUUGAGCU | |
| R5224_CasPhi12 | CUUUCAAGACUAAUAGAUUGCUCCUUACGAGG | 2136 |
| | AGACUCCAGUUCCUCGUUGAGCUG | |
| R5225_CasPhi12 | CUUUCAAGACUAAUAGAUUGCUCCUUACGAGG | 2137 |
| | AGACAGGCAGCUCAACGAGGAACU | |
| R5226_CasPhi12 | CUUUCAAGACUAAUAGAUUGCUCCUUACGAGG | 2138 |
| | AGACCUCGUUGAGCUGCCUGAAUC | |
| R5227_CasPhi12 | CUUUCAAGACUAAUAGAUUGCUCCUUACGAGG | 2139 |
| | AGACAGCUGCCUGAAUCUCCCUGA | |
| R5228_CasPhi12 | CUUUCAAGACUAAUAGAUUGCUCCUUACGAGG | 2140 |
| | AGACGUCCCCACCAUCUCCACUCU | |
| R5229_CasPhi12 | CUUUCAAGACUAAUAGAUUGCUCCUUACGAGG | 2141 |
| | AGACUCCCCACCAUCUCCACUCUG | |
| R5230_CasPhi12 | CUUUCAAGACUAAUAGAUUGCUCCUUACGAGG | 2142 |
| | AGACCCAGAGCCCAUGGGGCAGAG | |
| R5231_CasPhi12 | CUUUCAAGACUAAUAGAUUGCUCCUUACGAGG | 2143 |
| | AGACGCCAGAGCCCAUGGGGCAGA | |
| R5232_CasPhi12 | CUUUCAAGACUAAUAGAUUGCUCCUUACGAGG | 2144 |
| | AGACCAGCCUCAGAGAUUUGCCAG | |
| R5233_CasPhi12 | CUUUCAAGACUAAUAGAUUGCUCCUUACGAGG | 2145 |
| | AGACGGAGGCCGUGGACAGUGAAU | |
| R5234_CasPhi12 | CUUUCAAGACUAAUAGAUUGCUCCUUACGAGG | 2146 |
| | AGACACUGUCCACGGCCUCCCAAC | |
| R5235_CasPhi12 | CUUUCAAGACUAAUAGAUUGCUCCUUACGAGG | 2147 |
| | AGACGCUCCAUCAGCCACUGACCU | |
| R5236_CasPhi12 | CUUUCAAGACUAAUAGAUUGCUCCUUACGAGG | 2148 |
| | AGACAGGCAUGCUGGGCAGGUCAG | |
| R5237_CasPhi12 | CUUUCAAGACUAAUAGAUUGCUCCUUACGAGG | 2149 |
| | AGACCUCGGGAGGUCAGGGCAGGU | |
| R5238_CasPhi12 | CUUUCAAGACUAAUAGAUUGCUCCUUACGAGG | 2150 |
| | AGACGCUCGGGAGGUCAGGGCAGG | |
| R5239_CasPhi12 | CUUUCAAGACUAAUAGAUUGCUCCUUACGAGG | 2151 |
| | AGACGAGACCUCUCCAGCUGCCGG | |
| R5240_CasPhi12 | CUUUCAAGACUAAUAGAUUGCUCCUUACGAGG | 2152 |
| | AGACUUGGAGACCUCUCCAGCUGC | |
| R5241_CasPhi12 | CUUUCAAGACUAAUAGAUUGCUCCUUACGAGG | 2153 |
| | AGACGAAGCUUGUUGGAGACCUCU | |
| R5242_CasPhi12 | CUUUCAAGACUAAUAGAUUGCUCCUUACGAGG | 2154 |
| | AGACGGAAGCUUGUUGGAGACCUC | |
| R5243_CasPhi12 | CUUUCAAGACUAAUAGAUUGCUCCUUACGAGG | 2155 |
| | AGACUGGAAGCUUGUUGGAGACCU | |
| R5244_CasPhi12 | CUUUCAAGACUAAUAGAUUGCUCCUUACGAGG | 2156 |
| | AGACUACCGCUCACUGCAGGACAC | |
| R5245_CasPhi12 | CUUUCAAGACUAAUAGAUUGCUCCUUACGAGG | 2157 |
| | AGACCUGCUGCUCCUCUCCAGCCU | |
| R5246_CasPhi12 | CUUUCAAGACUAAUAGAUUGCUCCUUACGAGG | 2158 |
| | AGACCCGCUCCAGGCUCUUGCUGC | |
| R5247_CasPhi12 | CUUUCAAGACUAAUAGAUUGCUCCUUACGAGG | 2159 |
| | AGACUGCCCAGUCCGGGGUGGCCA | |
| R5248_CasPhi12 | CUUUCAAGACUAAUAGAUUGCUCCUUACGAGG | 2160 |
| | AGACGGCCAGCUGCCGUUCUGCCC | |
| R5249_CasPhi12 | CUUUCAAGACUAAUAGAUUGCUCCUUACGAGG | 2161 |
| | AGACGCAGCCAACAGCACCUCAGC | |
| R5250_CasPhi12 | CUUUCAAGACUAAUAGAUUGCUCCUUACGAGG | 2162 |
| | AGACGCUGCCAAGGAGCACCGGCG | |
| R5251_CasPhi12 | CUUUCAAGACUAAUAGAUUGCUCCUUACGAGG | 2163 |
| | AGACCCCAGCACAGCAAUCACUCG | |
| R5252_CasPhi12 | CUUUCAAGACUAAUAGAUUGCUCCUUACGAGG | 2164 |
| | AGACGCCCAGCACAGCAAUCACUC | |
| R5253_CasPhi12 | CUUUCAAGACUAAUAGAUUGCUCCUUACGAGG | 2165 |
| | AGACCUGUGCUGGGCAAAGCUGGU | |
| R5254_CasPhi12 | CUUUCAAGACUAAUAGAUUGCUCCUUACGAGG | 2166 |
| | AGACCCCUGACCAGCUUUGCCCAG | |
| R5255_CasPhi12 | CUUUCAAGACUAAUAGAUUGCUCCUUACGAGG | 2167 |
| | AGACGGCUGGGGCAGUGAGCCGGG | |
| R5256_CasPhi12 | CUUUCAAGACUAAUAGAUUGCUCCUUACGAGG | 2168 |
| | AGACUGGCCGGCUUCCCCAGUACG | |
| R5257_CasPhi12 | CUUUCAAGACUAAUAGAUUGCUCCUUACGAGG | 2169 |
| | AGACCCCAGUACGACUUUGUCUUC | |
| R5258_CasPhi12 | CUUUCAAGACUAAUAGAUUGCUCCUUACGAGG | 2170 |
| | AGACGUCUUCUCUGUCCCCUGCCA | |
| R5259_CasPhi12 | CUUUCAAGACUAAUAGAUUGCUCCUUACGAGG | 2171 |
| | AGACUCUUCUCUGUCCCCUGCCAU | |
| R5260_CasPhi12 | CUUUCAAGACUAAUAGAUUGCUCCUUACGAGG | 2172 |
| | AGACUCUGUCCCCUGCCAUUGCUU | |
| R5261_CasPhi12 | CUUUCAAGACUAAUAGAUUGCUCCUUACGAGG | 2173 |
| | AGACAAGCAAUGGCAGGGGACAGA | |
| R5262_CasPhi12 | CUUUCAAGACUAAUAGAUUGCUCCUUACGAGG | 2174 |
| | AGACCUUGAACCGUCCGGGGGAUG | |
| R5263_CasPhi12 | CUUUCAAGACUAAUAGAUUGCUCCUUACGAGG | 2175 |
| | AGACAACCGUCCGGGGGAUGCCUA | |
| R5264_CasPhi12 | CUUUCAAGACUAAUAGAUUGCUCCUUACGAGG | 2176 |
| | AGACUCCCUGGGCCCACAGCCACU | |
| R5265_CasPhi12 | CUUUCAAGACUAAUAGAUUGCUCCUUACGAGG | 2177 |
| | AGACAAGAUGUGGCUGAAAACCUC | |
| R5266_CasPhi12 | CUUUCAAGACUAAUAGAUUGCUCCUUACGAGG | 2178 |
| | AGACUCAGCCACAUCUUGAAGAGA | |
| R5267_CasPhi12 | CUUUCAAGACUAAUAGAUUGCUCCUUACGAGG | 2179 |
| | AGACCAGCCACAUCUUGAAGAGAC | |
| R5268_CasPhi12 | CUUUCAAGACUAAUAGAUUGCUCCUUACGAGG | 2180 |
| | AGACAGCCACAUCUUGAAGAGACC | |
| R5269_CasPhi12 | CUUUCAAGACUAAUAGAUUGCUCCUUACGAGG | 2181 |
| | AGACAAGAGACCUGACCGCGUUCU | |
| R5270_CasPhi12 | CUUUCAAGACUAAUAGAUUGCUCCUUACGAGG | 2182 |
| | AGACUGCUCAUCCUAGACGGCUUC | |
| R5271_CasPhi12 | CUUUCAAGACUAAUAGAUUGCUCCUUACGAGG | 2183 |
| | AGACCAGCUCCUCGAAGCCGUCUA | |
| R5272_CasPhi12 | CUUUCAAGACUAAUAGAUUGCUCCUUACGAGG | 2184 |
| | AGACCGCUUCCAGCUCCUCGAAGC | |
| R5273_CasPhi12 | CUUUCAAGACUAAUAGAUUGCUCCUUACGAGG | 2185 |
| | AGACGAGGAGCUGGAAGCGCAAGA | |
| R5274_CasPhi12 | CUUUCAAGACUAAUAGAUUGCUCCUUACGAGG | 2186 |
| | AGACCUGCACAGCACGUGCGGACC | |
| R5275_CasPhi12 | CUUUCAAGACUAAUAGAUUGCUCCUUACGAGG | 2187 |
| | AGACUGGAAAAGGCCGGCCAGCAG | |
| R5276_CasPhi12 | CUUUCAAGACUAAUAGAUUGCUCCUUACGAGG | 2188 |
| | AGACUUCUGGAAAAGGCCGGCCAG | |
| R5277_CasPhi12 | CUUUCAAGACUAAUAGAUUGCUCCUUACGAGG | 2189 |
| | AGACUCCAGAAGAAGCUGCUCCGA | |
| R5278_CasPhi12 | CUUUCAAGACUAAUAGAUUGCUCCUUACGAGG | 2190 |
| | AGACCCAGAAGAAGCUGCUCCGAG | |
| R5279_CasPhi12 | CUUUCAAGACUAAUAGAUUGCUCCUUACGAGG | 2191 |
| | AGACCAGAAGAAGCUGCUCCGAGG | |
| R5280_CasPhi12 | CUUUCAAGACUAAUAGAUUGCUCCUUACGAGG | 2192 |
| | AGACCACCCUCCUCCUCACAGCCC | |
| R5281_CasPhi12 | CUUUCAAGACUAAUAGAUUGCUCCUUACGAGG | 2193 |
| | AGACCUCAGGCUCUGGACCAGGCG | |
| R5282_CasPhi12 | CUUUCAAGACUAAUAGAUUGCUCCUUACGAGG | 2194 |
| | AGACGAGCUGUCCGGCUUCUCCAU | |
| R5283_CasPhi12 | CUUUCAAGACUAAUAGAUUGCUCCUUACGAGG | 2195 |
| | AGACAGCUGUCCGGCUUCUCCAUG | |
| R5284_CasPhi12 | CUUUCAAGACUAAUAGAUUGCUCCUUACGAGG | 2196 |
| | AGACUCCAUGGAGCAGGCCCAGGC | |
| R5285_CasPhi12 | CUUUCAAGACUAAUAGAUUGCUCCUUACGAGG | 2197 |
| | AGACGAGAGCUCAGGGAUGACAGA | |
| R5286_CasPhi12 | CUUUCAAGACUAAUAGAUUGCUCCUUACGAGG | 2198 |
| | AGACAGAGCUCAGGGAUGACAGAG | |
| R5287_CasPhi12 | CUUUCAAGACUAAUAGAUUGCUCCUUACGAGG | 2199 |
| | AGACGUGCUCUGUCAUCCCUGAGC | |
| R5288_CasPhi12 | CUUUCAAGACUAAUAGAUUGCUCCUUACGAGG | 2200 |
| | AGACUUCUCAGUCACAGCCACAGC | |
| R5289_CasPhi12 | CUUUCAAGACUAAUAGAUUGCUCCUUACGAGG | 2201 |
| | AGACUCAGUCACAGCCACAGCCCU | |
| R5290_CasPhi12 | CUUUCAAGACUAAUAGAUUGCUCCUUACGAGG | 2202 |
| | AGACGUGCCGGGCAGUGUGCCAGC | |
| R5291_CasPhi12 | CUUUCAAGACUAAUAGAUUGCUCCUUACGAGG | 2203 |
| | AGACUGCCGGGCAGUGUGCCAGCU | |
| R5292_CasPhi12 | CUUUCAAGACUAAUAGAUUGCUCCUUACGAGG | 2204 |
| | AGACGCGUCCUCCCCAAGCUCCAG | |
| R5293_CasPhi12 | CUUUCAAGACUAAUAGAUUGCUCCUUACGAGG | 2205 |
| | AGACGGGAGGACGCCAAGCUGCCC | |
| R5294_CasPhi12 | CUUUCAAGACUAAUAGAUUGCUCCUUACGAGG | 2206 |
| | AGACGCCAGCUCUGCCAGGGCCCC | |
| R5295_CasPhi12 | CUUUCAAGACUAAUAGAUUGCUCCUUACGAGG | 2207 |
| | AGACAUGUCUGCGGCCCAGCUCCC | |
| R5392_CasPhi12 | CUUUCAAGACUAAUAGAUUGCUCCUUACGAGG | 2208 |
| | AGACGAUGUCUGCGGCCCAGCUCC | |
| R5393_CasPhi12 | CUUUCAAGACUAAUAGAUUGCUCCUUACGAGG | 2209 |
| | AGACCCAUCCGCAGACGUGAGGAC | |
| R5394_CasPhi12 | CUUUCAAGACUAAUAGAUUGCUCCUUACGAGG | 2210 |
| | AGACGCCAUCGCCCAGGUCCUCAC | |
| R5395_CasPhi12 | CUUUCAAGACUAAUAGAUUGCUCCUUACGAGG | 2211 |
| | AGACGGCCAUCGCCCAGGUCCUCA | |
| R5396_CasPhi12 | CUUUCAAGACUAAUAGAUUGCUCCUUACGAGG | 2212 |
| | AGACGACUAAGCCUUUGGCCAUCG | |
| R5397_CasPhi12 | CUUUCAAGACUAAUAGAUUGCUCCUUACGAGG | 2213 |
| | AGACGUCCAACACCCACCGCGGGC | |
| R5398_CasPhi12 | CUUUCAAGACUAAUAGAUUGCUCCUUACGAGG | 2214 |
| | AGACCAGGAGGAAGCUGGGGAAGG | |
| R5399_CasPhi12 | CUUUCAAGACUAAUAGAUUGCUCCUUACGAGG | 2215 |
| | AGACCCCAGCUUCCUCCUGCAAUG | |
| R5400_CasPhi12 | CUUUCAAGACUAAUAGAUUGCUCCUUACGAGG | 2216 |
| | AGACCUCCUGCAAUGCUUCCUGGG | |
| R5401_CasPhi12 | CUUUCAAGACUAAUAGAUUGCUCCUUACGAGG | 2217 |
| | AGACCUGGGGGCCCUGUGGCUGGC | |
| R5402_CasPhi12 | CUUUCAAGACUAAUAGAUUGCUCCUUACGAGG | 2218 |
| | AGACGCCACUCAGAGCCAGCCACA | |
| R5403_CasPhi12 | CUUUCAAGACUAAUAGAUUGCUCCUUACGAGG | 2219 |
| | AGACCGCCACUCAGAGCCAGCCAC | |
| R5404_CasPhi12 | CUUUCAAGACUAAUAGAUUGCUCCUUACGAGG | 2220 |
| | AGACAUUUCGCCACUCAGAGCCAG | |
| R5405_CasPhi12 | CUUUCAAGACUAAUAGAUUGCUCCUUACGAGG | 2221 |
| | AGACUCCUUGAUUUCGCCACUCAG | |
| R5406_CasPhi12 | CUUUCAAGACUAAUAGAUUGCUCCUUACGAGG | 2222 |
| | AGACGGGUCAAUGCUAGGUACUGC | |
| R5407_CasPhi12 | CUUUCAAGACUAAUAGAUUGCUCCUUACGAGG | 2223 |
| | AGACCUUGGGGUCAAUGCUAGGUA | |
| R5408_CasPhi12 | CUUUCAAGACUAAUAGAUUGCUCCUUACGAGG | 2224 |
| | AGACUUCCUUGGGGUCAAUGCUAG | |
| R5409_CasPhi12 | CUUUCAAGACUAAUAGAUUGCUCCUUACGAGG | 2225 |
| | AGACACCCCAAGGAAGAAGAGGCC | |
| R5410_CasPhi12 | CUUUCAAGACUAAUAGAUUGCUCCUUACGAGG | 2226 |
| | AGACUCAUAGGGCCUCUUCUUCCU | |
| R5411_CasPhi12 | CUUUCAAGACUAAUAGAUUGCUCCUUACGAGG | 2227 |
| | AGACCUGGCUGGGCUGAUCUUCCA | |
| R5412_CasPhi12 | CUUUCAAGACUAAUAGAUUGCUCCUUACGAGG | 2228 |
| | AGACUGGCUGGGCUGAUCUUCCAG | |
| R5413_CasPhi12 | CUUUCAAGACUAAUAGAUUGCUCCUUACGAGG | 2229 |
| | AGACCAGCCUCCCGCCCGCUGCCU | |
| R5414_CasPh12 | CUUUCAAGACUAAUAGAUUGCUCCUUACGAGG | 2230 |
| | AGACCUGUCCACCGAGGCAGCCGC | |
| R5415_CasPh12 | CUUUCAAGACUAAUAGAUUGCUCCUUACGAGG | 2231 |
| | AGACUGCUUCCUGUCCACCGAGGC | |
| R5416_CasPh12 | CUUUCAAGACUAAUAGAUUGCUCCUUACGAGG | 2232 |
| | AGACAGGUACCUCGCAAGCACCUU | |
| R5417_CasPh12 | CUUUCAAGACUAAUAGAUUGCUCCUUACGAGG | 2233 |
| | AGACCGAGGUACCUGAAGCGGCUG | |
| R5418_CasPh12 | CUUUCAAGACUAAUAGAUUGCUCCUUACGAGG | 2234 |
| | AGACCAGCCUCCUCGGCCUCGUGG | |
| R5419_CasPh12 | CUUUCAAGACUAAUAGAUUGCUCCUUACGAGG | 2235 |
| | AGACGGCAGCACGUGGUACAGGAG | |
| R5420_CasPh12 | CUUUCAAGACUAAUAGAUUGCUCCUUACGAGG | 2236 |
| | AGACGCAGCACGUGGUACAGGAGC | |
| R5421_CasPh12 | CUUUCAAGACUAAUAGAUUGCUCCUUACGAGG | 2237 |
| | AGACUCUGGGCACCCGCCUCACGC | |
| R5422_CasPh12 | CUUUCAAGACUAAUAGAUUGCUCCUUACGAGG | 2238 |
| | AGACCUGGGCACCCGCCUCACGCC | |
| R5423_CasPh12 | CUUUCAAGACUAAUAGAUUGCUCCUUACGAGG | 2239 |
| | AGACUGGGCACCCGCCUCACGCCU | |
| R5424_CasPh12 | CUUUCAAGACUAAUAGAUUGCUCCUUACGAGG | 2240 |
| | AGACCCCAGUACAUGUGCAUCAGG | |
| R5425_CasPh12 | CUUUCAAGACUAAUAGAUUGCUCCUUACGAGG | 2241 |
| | AGACGCCCGCCGCCUCCAAGGCCU | |
| R5426_CasPh12 | CUUUCAAGACUAAUAGAUUGCUCCUUACGAGG | 2242 |
| | AGACGAGGCGGCGGGCCAAGACUU | |
| R5427_CasPh12 | CUUUCAAGACUAAUAGAUUGCUCCUUACGAGG | 2243 |
| | AGACUCCCUGGACCUCCGCAGCAC | |
| R5428_CasPh12 | CUUUCAAGACUAAUAGAUUGCUCCUUACGAGG | 2244 |
| | AGACGCCCCUCUGGAUUGGGGAGC | |
| R5429_CasPh12 | CUUUCAAGACUAAUAGAUUGCUCCUUACGAGG | 2245 |
| | AGACCCCCUCUGGAUUGGGGAGCC | |
| R5430_CasPh12 | CUUUCAAGACUAAUAGAUUGCUCCUUACGAGG | 2246 |
| | AGACGGGAGCCUCGUGGGACUCAG | |
| R5431_CasPh12 | CUUUCAAGACUAAUAGAUUGCUCCUUACGAGG | 2247 |
| | AGACGUCUCCCCAUGCUGCUGCAG | |
| R5432_CasPh12 | CUUUCAAGACUAAUAGAUUGCUCCUUACGAGG | 2248 |
| | AGACUCCUCUGCUGCCUGAAGUAG | |
| R5433_CasPh12 | CUUUCAAGACUAAUAGAUUGCUCCUUACGAGG | 2249 |
| | AGACAGGCAGCAGAGGAGAAGUUC | |
| R5434_CasPh12 | CUUUCAAGACUAAUAGAUUGCUCCUUACGAGG | 2250 |
| | AGACAAAGGCUCGAUGGUGAACUU | |
| R5435_CasPh12 | CUUUCAAGACUAAUAGAUUGCUCCUUACGAGG | 2251 |
| | AGACGAAAGGCUCGAUGGUGAACU | |
| R5436_CasPh12 | CUUUCAAGACUAAUAGAUUGCUCCUUACGAGG | 2252 |
| | AGACACCAUCGAGCCUUUCAAAGC | |
| R5437_CasPh12 | CUUUCAAGACUAAUAGAUUGCUCCUUACGAGG | 2253 |
| | AGACGCUUUGAAAGGCUCGAUGGU | |
| R5438_CasPh12 | CUUUCAAGACUAAUAGAUUGCUCCUUACGAGG | 2254 |
| | AGACAGGGACUUGGCUUUGAAAGG | |
| R5439_CasPh12 | CUUUCAAGACUAAUAGAUUGCUCCUUACGAGG | 2255 |
| | AGACCAAAGCCAAGUCCCUGAAGG | |
| R5440_CasPh12 | CUUUCAAGACUAAUAGAUUGCUCCUUACGAGG | 2256 |
| | AGACAAAGCCAAGUCCCUGAAGGA | |
| R5441_CasPh12 | CUUUCAAGACUAAUAGAUUGCUCCUUACGAGG | 2257 |
| | AGACCACAUCCUUCAGGGACUUGG | |
| R5442_CasPh12 | CUUUCAAGACUAAUAGAUUGCUCCUUACGAGG | 2258 |
| | AGACCCAGGUCUUCCACAUCCUUC | |
| R5443_CasPh12 | CUUUCAAGACUAAUAGAUUGCUCCUUACGAGG | 2259 |
| | AGACCCCAGGUCUUCCACAUCCUU | |
| R5444_CasPh12 | CUUUCAAGACUAAUAGAUUGCUCCUUACGAGG | 2260 |
| | AGACCUCGGAAGACACAGCUGGGG | |
| R5445_CasPh12 | CUUUCAAGACUAAUAGAUUGCUCCUUACGAGG | 2261 |
| | AGACGGUCCCGAACAGCAGGGAGC | |
| R5446_CasPh12 | CUUUCAAGACUAAUAGAUUGCUCCUUACGAGG | 2262 |
| | AGACAGGUCCCGAACAGCAGGGAG | |
| R5447_CasPh12 | CUUUCAAGACUAAUAGAUUGCUCCUUACGAGG | 2263 |
| | AGACUUUAGGUCCCGAACAGCAGG | |
| R5448_CasPh12 | CUUUCAAGACUAAUAGAUUGCUCCUUACGAGG | 2264 |
| | AGACCUUUAGGUCCCGAACAGCAG | |
| R5449_CasPh12 | CUUUCAAGACUAAUAGAUUGCUCCUUACGAGG | 2265 |
| | AGACGGGACCUAAAGAAACUGGAG | |
| R5450_CasPh12 | CUUUCAAGACUAAUAGAUUGCUCCUUACGAGG | 2266 |
| | AGACGGGAAAGCCUGGGGGCCUGA | |
| R5451_CasPh12 | CUUUCAAGACUAAUAGAUUGCUCCUUACGAGG | 2267 |
| | AGACGGGGAAAGCCUGGGGGCCUG | |
| R5452_CasPh12 | CUUUCAAGACUAAUAGAUUGCUCCUUACGAGG | 2268 |
| | AGACCCCCAAACUGGUGCGGAUCC | |
| R5453_CasPh12 | CUUUCAAGACUAAUAGAUUGCUCCUUACGAGG | 2269 |
| | AGACCCCAAACUGGUGCGGAUCCU | |
| R5454_CasPh12 | CUUUCAAGACUAAUAGAUUGCUCCUUACGAGG | 2270 |
| | AGACUUCUCACUCAGCGCAUCCAG | |
| R5455_CasPh12 | CUUUCAAGACUAAUAGAUUGCUCCUUACGAGG | 2271 |
| | AGACAGCUGGGGGAAGGUGGCUGA | |
| R5456_CasPh12 | CUUUCAAGACUAAUAGAUUGCUCCUUACGAGG | 2272 |
| | AGACCCCCAGCUGAAGUCCUUGGA | |
| R5457_CasPh12 | CUUUCAAGACUAAUAGAUUGCUCCUUACGAGG | 2273 |
| | AGACCAAGGACUUCAGCUGGGGGA | |
| R5458_CasPh12 | CUUUCAAGACUAAUAGAUUGCUCCUUACGAGG | 2274 |
| | AGACCCAAGGACUUCAGCUGGGGG | |
| R5459_CasPh12 | CUUUCAAGACUAAUAGAUUGCUCCUUACGAGG | 2275 |
| | AGACAGGGUUUCCAAGGACUUCAG | |
| R5460_CasPh12 | CUUUCAAGACUAAUAGAUUGCUCCUUACGAGG | 2276 |
| | AGACUAGGCACCCAGGUCAGUGAU | |
| R5461_CasPh12 | CUUUCAAGACUAAUAGAUUGCUCCUUACGAGG | 2277 |
| | AGACGUAGGCACCCAGGUCAGUGA | |
| R5462_CasPh12 | CUUUCAAGACUAAUAGAUUGCUCCUUACGAGG | 2278 |
| | AGACGCUCGCUGCAUCCCUGCUCA | |
| R5463_CasPh12 | CUUUCAAGACUAAUAGAUUGCUCCUUACGAGG | 2279 |
| | AGACGCCUGAGCAGGGAUGCAGCG | |
| R5464_CasPh12 | CUUUCAAGACUAAUAGAUUGCUCCUUACGAGG | 2280 |
| | AGACUACAAUAACUGCAUCUGCGA | |
| R5465_CasPh12 | CUUUCAAGACUAAUAGAUUGCUCCUUACGAGG | 2281 |
| | AGACGCUCGUGUGCUUCCGGACAU | |
| R5466_CasPh12 | CUUUCAAGACUAAUAGAUUGCUCCUUACGAGG | 2282 |
| | AGACCGGACAUGGUGUCCCUCCGG | |
| R5467_CasPh12 | CUUUCAAGACUAAUAGAUUGCUCCUUACGAGG | 2283 |
| | AGACACGGCUGCCGGGGCCCAGCA | |
| R5468_CasPh12 | CUUUCAAGACUAAUAGAUUGCUCCUUACGAGG | 2284 |
| | AGACGGAGGUGUCCUCAUGUGGAG | |
| R5469_CasPh12 | CUUUCAAGACUAAUAGAUUGCUCCUUACGAGG | 2285 |
| | AGACCUGGACACUGAAUGGGAUGG | |
| R5470_CasPh12 | CUUUCAAGACUAAUAGAUUGCUCCUUACGAGG | 2286 |
| | AGACAGUGUCCAGGAACACCUGCA | |
| R5471_CasPh12 | CUUUCAAGACUAAUAGAUUGCUCCUUACGAGG | 2287 |
| | AGACCAGGUGUUCCUGGACACUGA | |
| R5472_CasPh12 | CUUUCAAGACUAAUAGAUUGCUCCUUACGAGG | 2288 |
| | AGACUUGCAGGUGUUCCUGGACAC | |
| R5473_CasPh12 | CUUUCAAGACUAAUAGAUUGCUCCUUACGAGG | 2289 |
| | AGACACGGAUCAGCCUGAGAUGAU | |

TABLE P
CasΦ.32 gRNAs targeting human CIITA

| | Repeat + | |
|---|---|---|
| Name | spacer sequence RNA Sequence (5′→3′) | SEQ ID NO |
| R4503_CasPhi32_ | GCUGGGGACCGAUCCUGAUUGCUCGCUGCGGCG | 992 |
| C2TA_T1.1 | AGACCUACACAAUGCGUUGCCUGG | |
| R4504_CasPhi32_ | GCUGGGGACCGAUCCUGAUUGCUCGCUGCGGCG | 993 |
| C2TA_T1.2 | AGACGGGCUCUGACAGGUAGGACC | |
| R4505_CasPhi32_ | GCUGGGGACCGAUCCUGAUUGCUCGCUGCGGCG | 994 |
| C2TA_T1.3 | AGACUGUAGGAAUCCCAGCCAGGC | |
| R4506_CasPhi32_ | GCUGGGGACCGAUCCUGAUUGCUCGCUGCGGCG | 995 |
| C2TA_T1.8 | AGACCCUGGCUCCACGCCCUGCUG | |
| R4507_CasPhi32_ | GCUGGGGACCGAUCCUGAUUGCUCGCUGCGGCG | 996 |
| C2TA_T1.9 | AGACGGGAAGCUGAGGGCACGAGG | |
| R4508_CasPhi32_ | GCUGGGGACCGAUCCUGAUUGCUCGCUGCGGCG | 997 |
| C2TA_T2.1 | AGACACAGCGAUGCUGACCCCCUG | |
| R4509_CasPhi32_ | GCUGGGGACCGAUCCUGAUUGCUCGCUGCGGCG | 998 |
| C2TA_T2.2 | AGACUUAACAGCGAUGCUGACCCC | |
| R4510_CasPhi32_ | GCUGGGGACCGAUCCUGAUUGCUCGCUGCGGCG | 999 |
| C2TA_T2.3 | AGACUAUGACCAGAUGGACCUGGC | |
| R4511_CasPhi32_ | GCUGGGGACCGAUCCUGAUUGCUCGCUGCGGCG | 1000 |
| C2TA_T2.4 | AGACGGGCCCCUAGAAGGUGGCUA | |
| R4512_CasPhi32_ | GCUGGGGACCGAUCCUGAUUGCUCGCUGCGGCG | 1001 |
| C2TA_T2.5 | AGACUAGGGGCCCCAACUCCAUGG | |
| R4513_CasPhi32_ | GCUGGGGACCGAUCCUGAUUGCUCGCUGCGGCG | 1002 |
| C2TA_T2.6 | AGACAGAAGCUCCAGGUAGCCACC | |
| R4514_CasPhi32_ | GCUGGGGACCGAUCCUGAUUGCUCGCUGCGGCG | 1003 |
| C2TA_T2.7 | AGACUCCAGCCAGGUCCAUCUGGU | |
| R4515_CasPhi32 | GCUGGGGACCGAUCCUGAUUGCUCGCUGCGGCG | 1004 |
| C2TA_T2.8 | AGACUUCUCCAGCCAGGUCCAUCU | |

TABLE Q
CasΦ.12 gRNAs targeting mouse PCSK9

| | Repeat + | |
|---|---|---|
| Name | spacer sequence RNA Sequence (5′→3′) | SEQ ID NO |
| R4238_ | CUUUCAAGACUAAUAGAUUGCUCCUUACGAGGAG | 1005 |
| CasPhi12 | ACCCGCUGUUGCCGCCGCUGCU | |
| R4239_ | CUUUCAAGACUAAUAGAUUGCUCCUUACGAGGAG | 1006 |
| CasPhi12 | ACCCGCCGCUGCUGCUGCUGUU | |
| R4240_ | CUUUCAAGACUAAUAGAUUGCUCCUUACGAGGAG | 1007 |
| CasPhi12 | ACCUGCUACUGUGCCCCACCGG | |
| R4241_ | CUUUCAAGACUAAUAGAUUGCUCCUUACGAGGAG | 1008 |
| CasPhi12 | ACAUAAUCUCCAUCCUCGUCCU | |
| R4242_ | CUUUCAAGACUAAUAGAUUGCUCCUUACGAGGAG | 1009 |
| CasPhi12 | ACUGAAGAGCUGAUGCUCGCCC | |
| R4243_ | CUUUCAAGACUAAUAGAUUGCUCCUUACGAGGAG | 1010 |
| CasPhi12 | ACGAGCAACGGCGGAAGGUGGC | |
| R4244_ | CUUUCAAGACUAAUAGAUUGCUCCUUACGAGGAG | 1011 |
| CasPhi12 | ACCUGGCAGCCUCCAGGCCUCC | |
| R4245_ | CUUUCAAGACUAAUAGAUUGCUCCUUACGAGGAG | 1012 |
| CasPhi12 | ACUGGUGCUGAUGGAGGAGACC | |
| R4246_ | CUUUCAAGACUAAUAGAUUGCUCCUUACGAGGAG | 1013 |
| CasPhi12 | ACAAUCUGUAGCCUCUGGGUCU | |
| R4247_ | CUUUCAAGACUAAUAGAUUGCUCCUUACGAGGAG | 1014 |
| CasPhi12 | ACUUCAAUCUGUAGCCUCUGGG | |
| R4248_ | CUUUCAAGACUAAUAGAUUGCUCCUUACGAGGAG | 1015 |
| CasPhi12 | ACGUUCAAUCUGUAGCCUCUGG | |
| R4249_ | CUUUCAAGACUAAUAGAUUGCUCCUUACGAGGAG | 1016 |
| CasPhi12 | ACAACAAACUGCCCACCGCCUG | |
| R4250_ | CUUUCAAGACUAAUAGAUUGCUCCUUACGAGGAG | 1017 |
| CasPhi12 | ACAUGACAUAGCCCCGGCGGGC | |
| R4251_ | CUUUCAAGACUAAUAGAUUGCUCCUUACGAGGAG | 1018 |
| CasPhi12 | ACUACAUAUCUUUUAUGACCUC | |
| R4252_ | CUUUCAAGACUAAUAGAUUGCUCCUUACGAGGAG | 1019 |
| CasPhi12 | ACUAUGACCUCUUCCCUGGCUU | |
| R4253_ | CUUUCAAGACUAAUAGAUUGCUCCUUACGAGGAG | 1020 |
| CasPhi12 | ACAUGACCUCUUCCCUGGCUUC | |
| R4254_ | CUUUCAAGACUAAUAGAUUGCUCCUUACGAGGAG | 1021 |
| CasPhi12 | ACUGACCUCUUCCCUGGCUUCU | |
| R4255_ | CUUUCAAGACUAAUAGAUUGCUCCUUACGAGGAG | 1022 |
| CasPhi12 | ACACCAAGAAGCCAGGGAAGAG | |
| R4256_ | CUUUCAAGACUAAUAGAUUGCUCCUUACGAGGAG | 1023 |
| CasPhi12 | ACCCUGGCUUCUUGGUGAAGAU | |
| R4257_ | CUUUCAAGACUAAUAGAUUGCUCCUUACGAGGAG | 1024 |
| CasPhi12 | ACUUGGUGAAGAUGAGCAGUGA | |
| R4258_ | CUUUCAAGACUAAUAGAUUGCUCCUUACGAGGAG | 1025 |
| CasPhi12 | ACGUGAAGAUGAGCAGUGACCU | |
| R4259_ | CUUUCAAGACUAAUAGAUUGCUCCUUACGAGGAG | 1026 |
| CasPhi12 | ACCCCCAUGUGGAGUACAUUGA | |
| R4260_ | CUUUCAAGACUAAUAGAUUGCUCCUUACGAGGAG | 1027 |
| CasPhi12 | ACCUCAAUGUACUCCACAUGGG | |
| R4261_ | CUUUCAAGACUAAUAGAUUGCUCCUUACGAGGAG | 1028 |
| CasPhi12 | ACAGGAAGACUCCUUUGUCUUC | |
| R4262_ | CUUUCAAGACUAAUAGAUUGCUCCUUACGAGGAG | 1029 |
| CasPhi12 | ACGUCUUCGCCCAGAGCAUCCC | |
| R4263_ | CUUUCAAGACUAAUAGAUUGCUCCUUACGAGGAG | 1030 |
| CasPhi12 | ACUCUUCGCCCAGAGCAUCCCA | |
| R4264_ | CUUUCAAGACUAAUAGAUUGCUCCUUACGAGGAG | 1031 |
| CasPhi12 | ACGCCCAGAGCAUCCCAUGGAA | |
| R4265_ | CUUUCAAGACUAAUAGAUUGCUCCUUACGAGGAG | 1032 |
| CasPhi12 | ACCAUGGGAUGCUCUGGGCGAA | |
| R4266_ | CUUUCAAGACUAAUAGAUUGCUCCUUACGAGGAG | 1033 |
| CasPhi12 | ACGCUCCAGGUUCCAUGGGAUG | |
| R4267_ | CUUUCAAGACUAAUAGAUUGCUCCUUACGAGGAG | 1034 |
| CasPhi12 | ACUCCCAGCAUGGCACCAGACA | |
| R4268_ | CUUUCAAGACUAAUAGAUUGCUCCUUACGAGGAG | 1035 |
| CasPhi12 | ACCUCUGUCUGGUGCCAUGCUG | |
| R4269_ | CUUUCAAGACUAAUAGAUUGCUCCUUACGAGGAG | 1036 |
| CasPhi12 | ACGAUACCAGCAUCCAGGGUGC | |
| R4270_ | CUUUCAAGACUAAUAGAUUGCUCCUUACGAGGAG | 1037 |
| CasPhi12 | ACAGGGCAGGGUCACCAUCACC | |
| R4271_ | CUUUCAAGACUAAUAGAUUGCUCCUUACGAGGAG | 1038 |
| CasPhi12 | ACAAGUCGGUGAUGGUGACCCU | |
| R4272_ | CUUUCAAGACUAAUAGAUUGCUCCUUACGAGGAG | 1039 |
| CasPhi12 | ACAACAGCGUGCCGGAGGAGGA | |
| R4273_ | CUUUCAAGACUAAUAGAUUGCUCCUUACGAGGAG | 1040 |
| CasPhi12 | ACGCCACACCAGCAUCCCGGCC | |
| R4274_ | CUUUCAAGACUAAUAGAUUGCUCCUUACGAGGAG | 1041 |
| CasPhi12 | ACAGCACACGCAGGCUGUGCAG | |
| R4275_ | CUUUCAAGACUAAUAGAUUGCUCCUUACGAGGAG | 1042 |
| CasPhi12 | ACACAGUUGAGCACACGCAGGC | |
| R4276_ | CUUUCAAGACUAAUAGAUUGCUCCUUACGAGGAG | 1043 |
| CasPhi12 | ACCCUUGACAGUUGAGCACACG | |
| R4277_ | CUUUCAAGACUAAUAGAUUGCUCCUUACGAGGAG | 1044 |
| CasPhi12 | ACGCUGACUCUUCCGAAUAAAC | |
| R4278_ | CUUUCAAGACUAAUAGAUUGCUCCUUACGAGGAG | 1045 |
| CasPhi12 | ACAUUCGGAAGAGUCAGCUAAU | |
| R4279_ | CUUUCAAGACUAAUAGAUUGCUCCUUACGAGGAG | 1046 |
| CasPhi12 | ACUUCGGAAGAGUCAGCUAAUC | |
| R4280_ | CUUUCAAGACUAAUAGAUUGCUCCUUACGAGGAG | 1047 |
| CasPhi12 | ACGGAAGAGUCAGCUAAUCCAG | |
| R4281_ | CUUUCAAGACUAAUAGAUUGCUCCUUACGAGGAG | 1048 |
| CasPhi12 | ACUGCUGCCCCUGGCCGGUGGG | |
| R4282_ | CUUUCAAGACUAAUAGAUUGCUCCUUACGAGGAG | 1049 |
| CasPhi12 | ACAGGAUGCGGCUAUACCCACC | |
| R4283_ | CUUUCAAGACUAAUAGAUUGCUCCUUACGAGGAG | 1050 |
| CasPhi12 | ACCCAGCUGCUGCAACCAGCAC | |
| R4284_ | CUUUCAAGACUAAUAGAUUGCUCCUUACGAGGAG | 1051 |
| CasPhi12 | ACCAGCAGCUGGGAACUUCCGG | |
| R4285_ | CUUUCAAGACUAAUAGAUUGCUCCUUACGAGGAG | 1052 |
| CasPhi12 | ACCGGGACGACGCCUGCCUCUA | |
| R4286_ | CUUUCAAGACUAAUAGAUUGCUCCUUACGAGGAG | 1053 |
| CasPhi12 | ACGUGGCCCCGACUGUGAUGAC | |
| R4287_ | CUUUCAAGACUAAUAGAUUGCUCCUUACGAGGAG | 1054 |
| CasPhi12 | ACCCUUGGGGACUUUGGGGACU | |
| R4288_ | CUUUCAAGACUAAUAGAUUGCUCCUUACGAGGAG | 1055 |
| CasPhi12 | ACGUCCCCAAAGUCCCCAAGGU | |
| R4289_ | CUUUCAAGACUAAUAGAUUGCUCCUUACGAGGAG | 1056 |
| CasPhi12 | ACGGGACUUUGGGGACUAAUUU | |
| R4290_ | CUUUCAAGACUAAUAGAUUGCUCCUUACGAGGAG | 1057 |
| CasPhi12 | ACGGGGACUAAUUUUGGACGCU | |
| R4291_ | CUUUCAAGACUAAUAGAUUGCUCCUUACGAGGAG | 1058 |
| CasPhi12 | ACGGGACUAAUUUUGGACGCUG | |
| R4292_ | CUUUCAAGACUAAUAGAUUGCUCCUUACGAGGAG | 1059 |
| CasPhi12 | ACUGGACGCUGUGUGGAUCUCU | |
| R4293_ | CUUUCAAGACUAAUAGAUUGCUCCUUACGAGGAG | 1060 |
| CasPhi12 | ACGGACGCUGUGUGGAUCUCUU | |
| R4294_ | CUUUCAAGACUAAUAGAUUGCUCCUUACGAGGAG | 1061 |
| CasPhi12 | ACGACGCUGUGUGGAUCUCUUU | |
| R4295_ | CUUUCAAGACUAAUAGAUUGCUCCUUACGAGGAG | 1062 |
| CasPhi12 | ACCCGGGGGCAAAGAGAUCCAC | |
| R4296_ | CUUUCAAGACUAAUAGAUUGCUCCUUACGAGGAG | 1063 |
| CasPhi12 | ACGCCCCCGGGAAGGACAUCAU | |
| R4297_ | CUUUCAAGACUAAUAGAUUGCUCCUUACGAGGAG | 1064 |
| CasPhi12 | ACCCCCCGGGAAGGACAUCAUC | |
| R4298_ | CUUUCAAGACUAAUAGAUUGCUCCUUACGAGGAG | 1065 |
| CasPhi12 | ACAUGUCACAGAGUGGGACCUC | |
| R4299_ | CUUUCAAGACUAAUAGAUUGCUCCUUACGAGGAG | 1066 |
| CasPhi12 | ACUGGCUCGGAUGCUGAGCCGG | |
| R4300_ | CUUUCAAGACUAAUAGAUUGCUCCUUACGAGGAG | 1067 |
| CasPhi12 | ACCCCUGGCCGAGCUGCGGCAG | |
| R4301_ | CUUUCAAGACUAAUAGAUUGCUCCUUACGAGGAG | 1068 |
| CasPhi12 | ACGUAGAGAAGUGGAUCAGCCU | |
| R4302_ | CUUUCAAGACUAAUAGAUUGCUCCUUACGAGGAG | 1069 |
| CasPhi12 | ACGGUAGAGAAGUGGAUCAGCC | |
| R4303_ | CUUUCAAGACUAAUAGAUUGCUCCUUACGAGGAG | 1070 |
| CasPhi12 | ACUCUACCAAAGACGUCAUCAA | |
| R4304_ | CUUUCAAGACUAAUAGAUUGCUCCUUACGAGGAG | 1071 |
| CasPhi12 | ACAUGACGUCUUUGGUAGAGAA | |
| R4305_ | CUUUCAAGACUAAUAGAUUGCUCCUUACGAGGAG | 1072 |
| CasPhi12 | ACCCUGAGGACCAGCAGGUGCU | |
| R4306_ | CUUUCAAGACUAAUAGAUUGCUCCUUACGAGGAG | 1073 |
| CasPhi12 | ACGGGGUCAGCACCUGCUGGUC | |
| R4307_ | CUUUCAAGACUAAUAGAUUGCUCCUUACGAGGAG | 1074 |
| CasPhi12 | ACGAGUGGGCCCCGAGUGUGCC | |
| R4308_ | CUUUCAAGACUAAUAGAUUGCUCCUUACGAGGAG | 1075 |
| CasPhi12 | ACUGGGGCACAGCGGGCUGUAG | |
| R4309_ | CUUUCAAGACUAAUAGAUUGCUCCUUACGAGGAG | 1076 |
| CasPhi12 | ACUCCAGGAGCGGGAGGCGUCG | |
| R4310_ | CUUUCAAGACUAAUAGAUUGCUCCUUACGAGGAG | 1077 |
| CasPhi12 | ACCAGACCUGCUGGCCUCCUAU | |
| R4311_ | CUUUCAAGACUAAUAGAUUGCUCCUUACGAGGAG | 1078 |
| CasPhi12 | ACAGGGCCUUGCAGACCUGCUG | |
| R4312_ | CUUUCAAGACUAAUAGAUUGCUCCUUACGAGGAG | 1079 |
| CasPhi12 | ACGGGGGUGAGGGUGUCUAUGC | |
| R4313_ | CUUUCAAGACUAAUAGAUUGCUCCUUACGAGGAG | 1080 |
| CasPhi12 | ACGGGGUGAGGGUGUCUAUGCC | |
| R4314_ | CUUUCAAGACUAAUAGAUUGCUCCUUACGAGGAG | 1081 |
| CasPhi12 | ACGCACGGGGAACCAGGCAGCA | |
| R4315_ | CUUUCAAGACUAAUAGAUUGCUCCUUACGAGGAG | 1082 |
| CasPhi12 | ACCCCGUGCCAACUGCAGCAUC | |
| R4316_ | CUUUCAAGACUAAUAGAUUGCUCCUUACGAGGAG | 1083 |
| CasPhi12 | ACUGGAUGCUGCAGUUGGCACG | |
| R4317_ | CUUUCAAGACUAAUAGAUUGCUCCUUACGAGGAG | 1084 |
| CasPhi12 | ACUGGUGGCAGUGGACAUGGGU | |
| R4318_ | CUUUCAAGACUAAUAGAUUGCUCCUUACGAGGAG | 1085 |
| CasPhi12 | ACCACUUCCCAAUGGAAGCUGC | |
| R4319_ | CUUUCAAGACUAAUAGAUUGCUCCUUACGAGGAG | 1086 |
| CasPhi12 | ACCAUUGGGAAGUGGAAGACCU | |
| R4320_ | CUUUCAAGACUAAUAGAUUGCUCCUUACGAGGAG | 1087 |
| CasPhi12 | ACGGAAGUGGAAGACCUUAGUG | |
| R4321_ | CUUUCAAGACUAAUAGAUUGCUCCUUACGAGGAG | 1088 |
| CasPhi12 | ACGUGUCCGGAGGCAGCCUGCG | |
| R4322_ | CUUUCAAGACUAAUAGAUUGCUCCUUACGAGGAG | 1089 |
| CasPhi12 | ACGCCACCAGGCGGCCAGUGUC | |
| R4323_ | CUUUCAAGACUAAUAGAUUGCUCCUUACGAGGAG | 1090 |
| CasPhi12 | ACCUGCUGCCAUGCCCCAGGGC | |
| R4324_ | CUUUCAAGACUAAUAGAUUGCUCCUUACGAGGAG | 1091 |
| CasPhi12 | ACCAGCCCUGGGGCAUGGCAGC | |
| R4325_ | CUUUCAAGACUAAUAGAUUGCUCCUUACGAGGAG | 1092 |
| CasPhi12 | ACCAUUCCAGCCCUGGGGCAUG | |
| R4326_ | CUUUCAAGACUAAUAGAUUGCUCCUUACGAGGAG | 1093 |
| CasPhi12 | ACGCAUUCCAGCCCUGGGGCAU | |
| R4327_ | CUUUCAAGACUAAUAGAUUGCUCCUUACGAGGAG | 1094 |
| CasPhi12 | ACUGCAUUCCAGCCCUGGGGCA | |
| R4328_ | CUUUCAAGACUAAUAGAUUGCUCCUUACGAGGAG | 1095 |
| CasPhi12 | ACAUUUUGCAUUCCAGCCCUGG | |
| R4329_ | CUUUCAAGACUAAUAGAUUGCUCCUUACGAGGAG | 1096 |
| CasPhi12 | ACCAUCCAGUCAGGGUCCAUCC | |
| R4330_ | CUUUCAAGACUAAUAGAUUGCUCCUUACGAGGAG | 1097 |
| CasPhi12 | ACUCCACGCUGUAGGCUCCCAG | |
| R4331_ | CUUUCAAGACUAAUAGAUUGCUCCUUACGAGGAG | 1098 |
| CasPhi12 | ACCCACACACAGGUUGUCCACG | |
| R4332_ | CUUUCAAGACUAAUAGAUUGCUCCUUACGAGGAG | 1099 |
| CasPhi12 | ACUCCACUGGUCCUGUCUGCUC | |
| R4333_ | CUUUCAAGACUAAUAGAUUGCUCCUUACGAGGAG | 1100 |
| CasPhi12 | ACCUGAAGGCCGGCUCCGGCAG | |

TABLE R
CasΦ.32 gRNAs targeting mouse PCSK9

| | Repeat + | |
|---|---|---|
| Name | spacer sequence RNA Sequence (5′→3′) | SEQ ID NO |
| R4238_ | GCUGGGGACCGAUCCUGAUUGCUCGCUGCGGCGAG | 1101 |
| CasPhi32 | ACCCGCUGUUGCCGCCGCUGCU | |
| R4239_ | GCUGGGGACCGAUCCUGAUUGCUCGCUGCGGCGAG | 1102 |
| CasPhi32 | ACCCGCCGCUGCUGCUGCUGUU | |
| R4240_ | GCUGGGGACCGAUCCUGAUUGCUCGCUGCGGCGAG | 1103 |
| CasPhi32 | ACCUGCUACUGUGCCCCACCGG | |
| R4241_ | GCUGGGGACCGAUCCUGAUUGCUCGCUGCGGCGAG | 1104 |
| CasPhi32 | ACAUAAUCUCCAUCCUCGUCCU | |
| R4242_ | GCUGGGGACCGAUCCUGAUUGCUCGCUGCGGCGAG | 1105 |
| CasPhi32 | ACUGAAGAGCUGAUGCUCGCCC | |
| R4243_ | GCUGGGGACCGAUCCUGAUUGCUCGCUGCGGCGAG | 1106 |
| CasPhi32 | ACGAGCAACGGCGGAAGGUGGC | |
| R4244_ | GCUGGGGACCGAUCCUGAUUGCUCGCUGCGGCGAG | 1107 |
| CasPhi32 | ACCUGGCAGCCUCCAGGCCUCC | |
| R4245_ | GCUGGGGACCGAUCCUGAUUGCUCGCUGCGGCGAG | 1108 |
| CasPhi32 | ACUGGUGCUGAUGGAGGAGACC | |
| R4246_ | GCUGGGGACCGAUCCUGAUUGCUCGCUGCGGCGAG | 1109 |
| CasPhi32 | ACAAUCUGUAGCCUCUGGGUCU | |
| R4247_ | GCUGGGGACCGAUCCUGAUUGCUCGCUGCGGCGAG | 1110 |
| CasPhi32 | ACUUCAAUCUGUAGCCUCUGGG | |
| R4248_ | GCUGGGGACCGAUCCUGAUUGCUCGCUGCGGCGAG | 1111 |
| CasPhi32 | ACGUUCAAUCUGUAGCCUCUGG | |
| R4249_ | GCUGGGGACCGAUCCUGAUUGCUCGCUGCGGCGAG | 1112 |
| CasPhi32 | ACAACAAACUGCCCACCGCCUG | |
| R4250_ | GCUGGGGACCGAUCCUGAUUGCUCGCUGCGGCGAG | 1113 |
| CasPhi32 | ACAUGACAUAGCCCCGGCGGGC | |
| R4251_ | GCUGGGGACCGAUCCUGAUUGCUCGCUGCGGCGAG | 1114 |
| CasPhi32 | ACUACAUAUCUUUUAUGACCUC | |
| R4252_ | GCUGGGGACCGAUCCUGAUUGCUCGCUGCGGCGAG | 1115 |
| CasPhi32 | ACUAUGACCUCUUCCCUGGCUU | |
| R4253_ | GCUGGGGACCGAUCCUGAUUGCUCGCUGCGGCGAG | 1116 |
| CasPhi32 | ACAUGACCUCUUCCCUGGCUUC | |
| R4254_ | GCUGGGGACCGAUCCUGAUUGCUCGCUGCGGCGAG | 1117 |
| CasPhi32 | ACUGACCUCUUCCCUGGCUUCU | |
| R4255_ | GCUGGGGACCGAUCCUGAUUGCUCGCUGCGGCGAG | 1118 |
| CasPhi32 | ACACCAAGAAGCCAGGGAAGAG | |
| R4256_ | GCUGGGGACCGAUCCUGAUUGCUCGCUGCGGCGAG | 1119 |
| CasPhi32 | ACCCUGGCUUCUUGGUGAAGAU | |
| R4257_ | GCUGGGGACCGAUCCUGAUUGCUCGCUGCGGCGAG | 1120 |
| CasPhi32 | ACUUGGUGAAGAUGAGCAGUGA | |
| R4258_ | GCUGGGGACCGAUCCUGAUUGCUCGCUGCGGCGAG | 1121 |
| CasPhi32 | ACGUGAAGAUGAGCAGUGACCU | |
| R4259_ | GCUGGGGACCGAUCCUGAUUGCUCGCUGCGGCGAG | 1122 |
| CasPhi32 | ACCCCCAUGUGGAGUACAUUGA | |
| R4260_ | GCUGGGGACCGAUCCUGAUUGCUCGCUGCGGCGAG | 1123 |
| CasPhi32 | ACCUCAAUGUACUCCACAUGGG | |
| R4261_ | GCUGGGGACCGAUCCUGAUUGCUCGCUGCGGCGAG | 1124 |
| CasPhi32 | ACAGGAAGACUCCUUUGUCUUC | |
| R4262_ | GCUGGGGACCGAUCCUGAUUGCUCGCUGCGGCGAG | 1125 |
| CasPhi32 | ACGUCUUCGCCCAGAGCAUCCC | |
| R4263_ | GCUGGGGACCGAUCCUGAUUGCUCGCUGCGGCGAG | 1126 |
| CasPhi32 | ACUCUUCGCCCAGAGCAUCCCA | |
| R4264_ | GCUGGGGACCGAUCCUGAUUGCUCGCUGCGGCGAG | 1127 |
| CasPhi32 | ACGCCCAGAGCAUCCCAUGGAA | |
| R4265_ | GCUGGGGACCGAUCCUGAUUGCUCGCUGCGGCGAG | 1128 |
| CasPhi32 | ACCAUGGGAUGCUCUGGGCGAA | |
| R4266_ | GCUGGGGACCGAUCCUGAUUGCUCGCUGCGGCGAG | 1129 |
| CasPhi32 | ACGCUCCAGGUUCCAUGGGAUG | |
| R4267_ | GCUGGGGACCGAUCCUGAUUGCUCGCUGCGGCGAG | 1130 |
| CasPhi32 | ACUCCCAGCAUGGCACCAGACA | |
| R4268_ | GCUGGGGACCGAUCCUGAUUGCUCGCUGCGGCGAG | 1131 |
| CasPhi32 | ACCUCUGUCUGGUGCCAUGCUG | |
| R4269_ | GCUGGGGACCGAUCCUGAUUGCUCGCUGCGGCGAG | 1132 |
| CasPhi32 | ACGAUACCAGCAUCCAGGGUGC | |
| R4270_ | GCUGGGGACCGAUCCUGAUUGCUCGCUGCGGCGAG | 1133 |
| CasPhi32 | ACAGGGCAGGGUCACCAUCACC | |
| R4271_ | GCUGGGGACCGAUCCUGAUUGCUCGCUGCGGCGAG | 1134 |
| CasPhi32 | ACAAGUCGGUGAUGGUGACCCU | |
| R4272_ | GCUGGGGACCGAUCCUGAUUGCUCGCUGCGGCGAG | 1135 |
| CasPhi32 | ACAACAGCGUGCCGGAGGAGGA | |
| R4273_ | GCUGGGGACCGAUCCUGAUUGCUCGCUGCGGCGAG | 1136 |
| CasPhi32 | ACGCCACACCAGCAUCCCGGCC | |
| R4274_ | GCUGGGGACCGAUCCUGAUUGCUCGCUGCGGCGAG | 1137 |
| CasPhi32 | ACAGCACACGCAGGCUGUGCAG | |
| R4275_ | GCUGGGGACCGAUCCUGAUUGCUCGCUGCGGCGAG | 1138 |
| CasPhi32 | ACACAGUUGAGCACACGCAGGC | |
| R4276_ | GCUGGGGACCGAUCCUGAUUGCUCGCUGCGGCGAG | 1139 |
| CasPhi32 | ACCCUUGACAGUUGAGCACACG | |
| R4277_ | GCUGGGGACCGAUCCUGAUUGCUCGCUGCGGCGAG | 1140 |
| CasPhi32 | ACGCUGACUCUUCCGAAUAAAC | |
| R4278_ | GCUGGGGACCGAUCCUGAUUGCUCGCUGCGGCGAG | 1141 |
| CasPhi32 | ACAUUCGGAAGAGUCAGCUAAU | |
| R4279_ | GCUGGGGACCGAUCCUGAUUGCUCGCUGCGGCGAG | 1142 |
| CasPhi32 | ACUUCGGAAGAGUCAGCUAAUC | |
| R4280_ | GCUGGGGACCGAUCCUGAUUGCUCGCUGCGGCGAG | 1143 |
| CasPhi32 | ACGGAAGAGUCAGCUAAUCCAG | |
| R4281_ | GCUGGGGACCGAUCCUGAUUGCUCGCUGCGGCGAG | 1144 |
| CasPhi32 | ACUGCUGCCCCUGGCCGGUGGG | |
| R4282_ | GCUGGGGACCGAUCCUGAUUGCUCGCUGCGGCGAG | 1145 |
| CasPhi32 | ACAGGAUGCGGCUAUACCCACC | |
| R4283_ | GCUGGGGACCGAUCCUGAUUGCUCGCUGCGGCGAG | 1146 |
| CasPhi32 | ACCCAGCUGCUGCAACCAGCAC | |
| R4284_ | GCUGGGGACCGAUCCUGAUUGCUCGCUGCGGCGAG | 1147 |
| CasPhi32 | ACCAGCAGCUGGGAACUUCCGG | |
| R4285_ | GCUGGGGACCGAUCCUGAUUGCUCGCUGCGGCGAG | 1148 |
| CasPhi32 | ACCGGGACGACGCCUGCCUCUA | |
| R4286_ | GCUGGGGACCGAUCCUGAUUGCUCGCUGCGGCGAG | 1149 |
| CasPhi32 | ACGUGGCCCCGACUGUGAUGAC | |
| R4287_ | GCUGGGGACCGAUCCUGAUUGCUCGCUGCGGCGAG | 1150 |
| CasPhi32 | ACCCUUGGGGACUUUGGGGACU | |
| R4288_ | GCUGGGGACCGAUCCUGAUUGCUCGCUGCGGCGAG | 1151 |
| CasPhi32 | ACGUCCCCAAAGUCCCCAAGGU | |
| R4289_ | GCUGGGGACCGAUCCUGAUUGCUCGCUGCGGCGAG | 1152 |
| CasPhi32 | ACGGGACUUUGGGGACUAAUUU | |
| R4290_ | GCUGGGGACCGAUCCUGAUUGCUCGCUGCGGCGAG | 1153 |
| CasPhi32 | ACGGGGACUAAUUUUGGACGCU | |
| R4291_ | GCUGGGGACCGAUCCUGAUUGCUCGCUGCGGCGAG | 1154 |
| CasPhi32 | ACGGGACUAAUUUUGGACGCUG | |
| R4292_ | GCUGGGGACCGAUCCUGAUUGCUCGCUGCGGCGAG | 1155 |
| CasPhi32 | ACUGGACGCUGUGUGGAUCUCU | |
| R4293_ | GCUGGGGACCGAUCCUGAUUGCUCGCUGCGGCGAG | 1156 |
| CasPhi32 | ACGGACGCUGUGUGGAUCUCUU | |
| R4294_ | GCUGGGGACCGAUCCUGAUUGCUCGCUGCGGCGAG | 1157 |
| CasPhi32 | ACGACGCUGUGUGGAUCUCUUU | |
| R4295_ | GCUGGGGACCGAUCCUGAUUGCUCGCUGCGGCGAG | 1158 |
| CasPhi32 | ACCCGGGGGCAAAGAGAUCCAC | |
| R4296_ | GCUGGGGACCGAUCCUGAUUGCUCGCUGCGGCGAG | 1159 |
| CasPhi32 | ACGCCCCCGGGAAGGACAUCAU | |
| R4297_ | GCUGGGGACCGAUCCUGAUUGCUCGCUGCGGCGAG | 1160 |
| CasPhi32 | ACCCCCCGGGAAGGACAUCAUC | |
| R4298_ | GCUGGGGACCGAUCCUGAUUGCUCGCUGCGGCGAG | 1161 |
| CasPhi32 | ACAUGUCACAGAGUGGGACCUC | |
| R4299_ | GCUGGGGACCGAUCCUGAUUGCUCGCUGCGGCGAG | 1162 |
| CasPhi32 | ACUGGCUCGGAUGCUGAGCCGG | |
| R4300_ | GCUGGGGACCGAUCCUGAUUGCUCGCUGCGGCGAG | 1163 |
| CasPhi32 | ACCCCUGGCCGAGCUGCGGCAG | |
| R4301_ | GCUGGGGACCGAUCCUGAUUGCUCGCUGCGGCGAG | 1164 |
| CasPhi32 | ACGUAGAGAAGUGGAUCAGCCU | |
| R4302_ | GCUGGGGACCGAUCCUGAUUGCUCGCUGCGGCGAG | 1165 |
| CasPhi32 | ACGGUAGAGAAGUGGAUCAGCC | |
| R4303_ | GCUGGGGACCGAUCCUGAUUGCUCGCUGCGGCGAG | 1166 |
| CasPhi32 | ACUCUACCAAAGACGUCAUCAA | |
| R4304_ | GCUGGGGACCGAUCCUGAUUGCUCGCUGCGGCGAG | 1167 |
| CasPhi32 | ACAUGACGUCUUUGGUAGAGAA | |
| R4305_ | GCUGGGGACCGAUCCUGAUUGCUCGCUGCGGCGAG | 1168 |
| CasPhi32 | ACCCUGAGGACCAGCAGGUGCU | |
| R4306_ | GCUGGGGACCGAUCCUGAUUGCUCGCUGCGGCGAG | 1169 |
| CasPhi32 | ACGGGGUCAGCACCUGCUGGUC | |
| R4307_ | GCUGGGGACCGAUCCUGAUUGCUCGCUGCGGCGAG | 1170 |
| CasPhi32 | ACGAGUGGGCCCCGAGUGUGCC | |
| R4308_ | GCUGGGGACCGAUCCUGAUUGCUCGCUGCGGCGAG | 1171 |
| CasPhi32 | ACUGGGGCACAGCGGGCUGUAG | |
| R4309_ | GCUGGGGACCGAUCCUGAUUGCUCGCUGCGGCGAG | 1172 |
| CasPhi32 | ACUCCAGGAGCGGGAGGCGUCG | |
| R4310_ | GCUGGGGACCGAUCCUGAUUGCUCGCUGCGGCGAG | 1173 |
| CasPhi32 | ACCAGACCUGCUGGCCUCCUAU | |
| R4311_ | GCUGGGGACCGAUCCUGAUUGCUCGCUGCGGCGAG | 1174 |
| CasPhi32 | ACAGGGCCUUGCAGACCUGCUG | |
| R4312_ | GCUGGGGACCGAUCCUGAUUGCUCGCUGCGGCGAG | 1175 |
| CasPhi32 | ACGGGGGUGAGGGUGUCUAUGC | |
| R4313_ | GCUGGGGACCGAUCCUGAUUGCUCGCUGCGGCGAG | 1176 |
| CasPhi32 | ACGGGGUGAGGGUGUCUAUGCC | |
| R4314_ | GCUGGGGACCGAUCCUGAUUGCUCGCUGCGGCGAG | 1177 |
| CasPhi32 | ACGCACGGGGAACCAGGCAGCA | |
| R4315_ | GCUGGGGACCGAUCCUGAUUGCUCGCUGCGGCGAG | 1178 |
| CasPhi32 | ACCCCGUGCCAACUGCAGCAUC | |
| R4316_ | GCUGGGGACCGAUCCUGAUUGCUCGCUGCGGCGAG | 1179 |
| CasPhi32 | ACUGGAUGCUGCAGUUGGCACG | |
| R4317_ | GCUGGGGACCGAUCCUGAUUGCUCGCUGCGGCGAG | 1180 |
| CasPhi32 | ACUGGUGGCAGUGGACAUGGGU | |
| R4318_ | GCUGGGGACCGAUCCUGAUUGCUCGCUGCGGCGAG | 1181 |
| CasPhi32 | ACCACUUCCCAAUGGAAGCUGC | |
| R4319_ | GCUGGGGACCGAUCCUGAUUGCUCGCUGCGGCGAG | 1182 |
| CasPhi32 | ACCAUUGGGAAGUGGAAGACCU | |
| R4320_ | GCUGGGGACCGAUCCUGAUUGCUCGCUGCGGCGAG | 1183 |
| CasPhi32 | ACGGAAGUGGAAGACCUUAGUG | |
| R4321_ | GCUGGGGACCGAUCCUGAUUGCUCGCUGCGGCGAG | 1184 |
| CasPhi32 | ACGUGUCCGGAGGCAGCCUGCG | |
| R4322_ | GCUGGGGACCGAUCCUGAUUGCUCGCUGCGGCGAG | 1185 |
| CasPhi32 | ACGCCACCAGGCGGCCAGUGUC | |
| R4323_ | GCUGGGGACCGAUCCUGAUUGCUCGCUGCGGCGAG | 1186 |
| CasPhi32 | ACCUGCUGCCAUGCCCCAGGGC | |
| R4324_ | GCUGGGGACCGAUCCUGAUUGCUCGCUGCGGCGAG | 1187 |
| CasPhi32 | ACCAGCCCUGGGGCAUGGCAGC | |
| R4325_ | GCUGGGGACCGAUCCUGAUUGCUCGCUGCGGCGAG | 1188 |
| CasPhi32 | ACCAUUCCAGCCCUGGGGCAUG | |
| R4326_ | GCUGGGGACCGAUCCUGAUUGCUCGCUGCGGCGAG | 1189 |
| CasPhi32 | ACGCAUUCCAGCCCUGGGGCAU | |
| R4327_ | GCUGGGGACCGAUCCUGAUUGCUCGCUGCGGCGAG | 1190 |
| CasPhi32 | ACUGCAUUCCAGCCCUGGGGCA | |
| R4328_ | GCUGGGGACCGAUCCUGAUUGCUCGCUGCGGCGAG | 1191 |
| CasPhi32 | ACAUUUUGCAUUCCAGCCCUGG | |
| R4329_ | GCUGGGGACCGAUCCUGAUUGCUCGCUGCGGCGAG | 1192 |
| CasPhi32 | ACCAUCCAGUCAGGGUCCAUCC | |
| R4330_ | GCUGGGGACCGAUCCUGAUUGCUCGCUGCGGCGAG | 1193 |
| CasPhi32 | ACUCCACGCUGUAGGCUCCCAG | |
| R4331_ | GCUGGGGACCGAUCCUGAUUGCUCGCUGCGGCGAG | 1194 |
| CasPhi32 | ACCCACACACAGGUUGUCCACG | |
| R4332_ | GCUGGGGACCGAUCCUGAUUGCUCGCUGCGGCGAG | 1195 |
| CasPhi32 | ACUCCACUGGUCCUGUCUGCUC | |
| R4333_ | GCUGGGGACCGAUCCUGAUUGCUCGCUGCGGCGAG | 1196 |
| CasPhi32 | ACCUGAAGGCCGGCUCCGGCAG | |

TABLE S
CasΦ.12 gRNAs targeting Bak1 in CHO cells

| | Repeat + spacer RNA Sequence | |
|---|---|---|
| Name | (5′→3′), shown as DNA | SEQ ID NO |
| R2452 | CTTTCAAGACTAATAGATTGCTCCTTACGAG | 1197 |
| Bak1_CasPhi12_1 | GAGACGAAGCTATGTTTTCCATCTC | |
| R2453 | CTTTCAAGACTAATAGATTGCTCCTTACGAG | 1198 |
| Bak1_CasPhi12_2 | GAGACGCAGGGGCAGCCGCCCCCTG | |
| R2454 | CTTTCAAGACTAATAGATTGCTCCTTACGAG | 1199 |
| Bak1_CasPhi12_3 | GAGACCTCCTAGAACCCAACAGGTA | |
| R2455 | CTTTCAAGACTAATAGATTGCTCCTTACGAG | 1200 |
| Bak1_CasPhi12_4 | GAGACGAAAGACCTCCTCTGTGTCC | |
| R2456 | CTTTCAAGACTAATAGATTGCTCCTTACGAG | 1201 |
| Bak1_CasPhi12_5 | GAGACTCCATCTCGGGGTTGGCAGG | |
| R2457 | CTTTCAAGACTAATAGATTGCTCCTTACGAG | 1202 |
| Bak1_CasPhi12_6 | GAGACTTCCTGATGGTGGAGATGGA | |
| R2849_Bak1_CasPhi12_ | CTTTCAAGACTAATAGATTGCTCCTTACGAG | 1203 |
| nsd_sg1 | GAGACCTGACTCCCAGCTCTGACCC | |
| R2850_Bak1_ | CTTTCAAGACTAATAGATTGCTCCTTACGAG | 1204 |
| CasPhi12_nsd_sg2 | GAGACTGGGGTCAGAGCTGGGAGTC | |
| R2851_Bak1_CasPhi12_ | CTTTCAAGACTAATAGATTGCTCCTTACGAG | 1205 |
| nsd_sg3 | GAGACGAAAGACCTCCTCTGTGTCC | |
| R2852_Bak1_ | CTTTCAAGACTAATAGATTGCTCCTTACGAG | 1206 |
| CasPhi12_nsd_sg4 | GAGACCGAAGCTATGTTTTCCATCT | |
| R2853_Bak1_ | CTTTCAAGACTAATAGATTGCTCCTTACGAG | 1207 |
| CasPhi12_nsd_sg5 | GAGACGAAGCTATGTTTTCCATCTC | |
| R2854_Bak1_ | CTTTCAAGACTAATAGATTGCTCCTTACGAG | 1208 |
| CasPhi12_nsd_sg6 | GAGACTCCATCTCCACCATCAGGAA | |
| R2855_Bak1_ | CTTTCAAGACTAATAGATTGCTCCTTACGAG | 1209 |
| CasPhi12_nsd_sg7 | GAGACCCATCTCCACCATCAGGAAC | |
| R2856_Bak1_ | CTTTCAAGACTAATAGATTGCTCCTTACGAG | 1210 |
| CasPhi12_nsd_sg8 | GAGACCTGATGGTGGAGATGGAAAA | |
| R2857_Bak1_ | CTTTCAAGACTAATAGATTGCTCCTTACGAG | 1211 |
| CasPhi12_nsd_sg9 | GAGACCATCTCCACCATCAGGAACA | |
| R2858_Bak1_ | CTTTCAAGACTAATAGATTGCTCCTTACGAG | 1212 |
| CasPhi12_nsd_sg10 | GAGACTTCCTGATGGTGGAGATGGA | |
| R2859_Bak1_ | CTTTCAAGACTAATAGATTGCTCCTTACGAG | 1213 |
| CasPhi12_nsd_sg11 | GAGACGCAGGGGCAGCCGCCCCCTG | |
| R2860_Bak1_ | CTTTCAAGACTAATAGATTGCTCCTTACGAG | 1214 |
| CasPhi12_nsd_sg12 | GAGACTCCATCTCGGGGTTGGCAGG | |
| R2861_Bak1_ | CTTTCAAGACTAATAGATTGCTCCTTACGAG | 1215 |
| CasPhi12_nsd_sg13 | GAGACTAGGAGCAAATTGTCCATCT | |
| R2862_Bak1_ | CTTTCAAGACTAATAGATTGCTCCTTACGAG | 1216 |
| CasPhi12_nsd_sg14 | GAGACGGTTCTAGGAGCAAATTGTC | |
| R2863_Bak1_ | CTTTCAAGACTAATAGATTGCTCCTTACGAG | 1217 |
| CasPhi12_nsd_sg15 | GAGACGCTCCTAGAACCCAACAGGT | |
| R2864_Bak1_ | CTTTCAAGACTAATAGATTGCTCCTTACGAG | 1218 |
| CasPhi12_nsd_sg16 | GAGACCTCCTAGAACCCAACAGGTA | |
| R3977 Bak1_ | CTTTCAAGACTAATAGATTGCTCCTTACGAG | 1219 |
| CasPhi12_exon1_sg1 | GAGACTCCAGACGCCATCTTTCAGG | |
| R3978 Bak1_ | CTTTCAAGACTAATAGATTGCTCCTTACGAG | 1220 |
| CasPhi12_exon1_sg2 | GAGACTGGTAAGAGTCCTCCTGCCC | |
| R3979 Bak1_ | CTTTCAAGACTAATAGATTGCTCCTTACGAG | 1221 |
| CasPhi12_exon3_sg1 | GAGACTTACAGCATCTTGGGTCAGG | |
| R3980 Bak1_ | CTTTCAAGACTAATAGATTGCTCCTTACGAG | 1222 |
| CasPhi12_exon3_sg2 | GAGACGGTCAGGTGGGCCGGCAGCT | |
| R3981 Bak1_ | CTTTCAAGACTAATAGATTGCTCCTTACGAG | 1223 |
| CasPhi12_exon3_sg3 | GAGACCTATCATTGGAGATGACATT | |
| R3982 Bak1_ | CTTTCAAGACTAATAGATTGCTCCTTACGAG | 1224 |
| CasPhi12_exon3_sg4 | GAGACGAGATGACATTAACCGGAGA | |
| R3983 Bak1_ | CTTTCAAGACTAATAGATTGCTCCTTACGAG | 1225 |
| CasPhi12_exon3_sg5 | GAGACTGGAACTCTGTGTCGTATCT | |
| R3984 Bak1_ | CTTTCAAGACTAATAGATTGCTCCTTACGAG | 1226 |
| CasPhi12_exon3_sg6 | GAGACCAGAATTTACTGGAGCAGCT | |
| R3985 Bak1_ | CTTTCAAGACTAATAGATTGCTCCTTACGAG | 1227 |
| CasPhi12_exon3_sg7 | GAGACACTGGAGCAGCTGCAGCCCA | |
| R3986 Bak1_ | CTTTCAAGACTAATAGATTGCTCCTTACGAG | 1228 |
| CasPhi12_exon3_sg8 | GAGACCCAGCTGTGGGCTGCAGCTG | |
| R3987 Bak1_ | CTTTCAAGACTAATAGATTGCTCCTTACGAG | 1229 |
| CasPhi12_exon3_sg9 | GAGACGTAGGCATTCCCAGCTGTGG | |
| R3988 Bak1_ | CTTTCAAGACTAATAGATTGCTCCTTACGAG | 1230 |
| CasPhi12_exon3_sg10 | GAGACGTGAAGAGTTCGTAGGCATT | |
| R3989 Bak1_ | CTTTCAAGACTAATAGATTGCTCCTTACGAG | 1231 |
| CasPhi12_exon3_sg11 | GAGACACCAAGATTGCCTCCAGGTA | |
| R3990 Bak1_ | CTTTCAAGACTAATAGATTGCTCCTTACGAG | 1232 |
| CasPhi12_exon3_sg12 | GAGACCCTCCAGGTACCCACCACCA | |

TABLE T
CasΦ.32 gRNAs targeting Bak1 in CHO cells

| | Repeat + spacer RNA Sequence | |
|---|---|---|
| Name | (5′→3′), shown as DNA | SEQ ID NO |
| R2452 | GCTGGGGACCGATCCTGATTGCTCGCTGCGG | 1233 |
| Bak1_CasPhi32_1 | CGAGACGAAGCTATGTTTTCCATCTC | |
| R2453 | GCTGGGGACCGATCCTGATTGCTCGCTGCGG | 1234 |
| Bak1_CasPhi32_2 | CGAGACGCAGGGGCAGCCGCCCCCTG | |
| R2454 | GCTGGGGACCGATCCTGATTGCTCGCTGCGG | 1235 |
| Bak1_CasPhi32_3 | CGAGACCTCCTAGAACCCAACAGGTA | |
| R2455 | GCTGGGGACCGATCCTGATTGCTCGCTGCGG | 1236 |
| Bak1_CasPhi32_4 | CGAGACGAAAGACCTCCTCTGTGTCC | |
| R2456 | GCTGGGGACCGATCCTGATTGCTCGCTGCGG | 1237 |
| Bak1_CasPhi32_5 | CGAGACTCCATCTCGGGGTTGGCAGG | |
| R2457 | GCTGGGGACCGATCCTGATTGCTCGCTGCGG | 1238 |
| Bak1_CasPhi32_6 | CGAGACTTCCTGATGGTGGAGATGGA | |
| R2849_Bak1_CasPhi32_ | GCTGGGGACCGATCCTGATTGCTCGCTGCGG | 1239 |
| nsd_sg1 | CGAGACCTGACTCCCAGCTCTGACCC | |
| R2850_Bak1_CasPhi32_ | GCTGGGGACCGATCCTGATTGCTCGCTGCGG | 1240 |
| nsd_sg2 | CGAGACTGGGGTCAGAGCTGGGAGTC | |
| R2851_Bak1_ | GCTGGGGACCGATCCTGATTGCTCGCTGCGG | 1241 |
| CasPhi32_nsd_sg3 | CGAGACGAAAGACCTCCTCTGTGTCC | |
| R2852_Bak1 | GCTGGGGACCGATCCTGATTGCTCGCTGCGG | 1242 |
| CasPhi321nsd_sg4 | CGAGACCGAAGCTATGTTTTCCATCT | |
| R2853_Bak1_ | GCTGGGGACCGATCCTGATTGCTCGCTGCGG | 1243 |
| CasPhi32_nsd_sg5 | CGAGACGAAGCTATGTTTTCCATCTC | |
| R2854_Bak1_ | GCTGGGGACCGATCCTGATTGCTCGCTGCGG | 1244 |
| CasPhi32_nsd_sg6 | CGAGACTCCATCTCCACCATCAGGAA | |
| R2855_Bak1_ | GCTGGGGACCGATCCTGATTGCTCGCTGCGG | 1245 |
| CasPhi32_nsd_sg7 | CGAGACCCATCTCCACCATCAGGAAC | |
| R2856_Bak1_ | GCTGGGGACCGATCCTGATTGCTCGCTGCGG | 1246 |
| CasPhi32_nsd_sg8 | CGAGACCTGATGGTGGAGATGGAAAA | |
| R2857_Bak1_ | GCTGGGGACCGATCCTGATTGCTCGCTGCGG | 1247 |
| CasPhi32_nsd_sg9 | CGAGACCATCTCCACCATCAGGAACA | |
| R2858_Bak1_ | GCTGGGGACCGATCCTGATTGCTCGCTGCGG | 1248 |
| CasPhi32_nsd_sg10 | CGAGACTTCCTGATGGTGGAGATGGA | |
| R2859_Bak1_ | GCTGGGGACCGATCCTGATTGCTCGCTGCGG | 1249 |
| CasPhi32_nsd_sg11 | CGAGACGCAGGGGCAGCCGCCCCCTG | |
| R2860_Bak1_ | GCTGGGGACCGATCCTGATTGCTCGCTGCGG | 1250 |
| CasPhi32_nsd_sg12 | CGAGACTCCATCTCGGGGTTGGCAGG | |
| R2861_Bak1_ | GCTGGGGACCGATCCTGATTGCTCGCTGCGG | 1251 |
| CasPhi32_nsd_sg13 | CGAGACTAGGAGCAAATTGTCCATCT | |
| R2862_Bak1_ | GCTGGGGACCGATCCTGATTGCTCGCTGCGG | 1252 |
| CasPhi32_nsd_sg14 | CGAGACGGTTCTAGGAGCAAATTGTC | |
| R2863_Bak1_ | GCTGGGGACCGATCCTGATTGCTCGCTGCGG | 1253 |
| CasPhi32_nsd_sg15 | CGAGACGCTCCTAGAACCCAACAGGT | |
| R2864_Bak1_ | GCTGGGGACCGATCCTGATTGCTCGCTGCGG | 1254 |
| CasPhi32_nsd_sg16 | CGAGACCTCCTAGAACCCAACAGGTA | |
| R3977 Bak1_ | GCTGGGGACCGATCCTGATTGCTCGCTGCGG | 1255 |
| CasPhi32_exon1_sg1 | CGAGACTCCAGACGCCATCTTTCAGG | |
| R3978 Bak1_ | GCTGGGGACCGATCCTGATTGCTCGCTGCGG | 1256 |
| CasPhi32_exon1_sg2 | CGAGACTGGTAAGAGTCCTCCTGCCC | |
| R3979 Bak1_ | GCTGGGGACCGATCCTGATTGCTCGCTGCGG | 1257 |
| CasPhi32_exon3_sg1 | CGAGACTTACAGCATCTTGGGTCAGG | |
| R3980 Bak1_ | GCTGGGGACCGATCCTGATTGCTCGCTGCGG | 1258 |
| CasPhi32_exon3_sg2 | CGAGACGGTCAGGTGGGCCGGCAGCT | |
| R3981 Bak1_ | GCTGGGGACCGATCCTGATTGCTCGCTGCGG | 1259 |
| CasPhi32_exon3_sg3 | CGAGACCTATCATTGGAGATGACATT | |
| R3982 Bak1_ | GCTGGGGACCGATCCTGATTGCTCGCTGCGG | 1260 |
| CasPhi32_exon3_sg4 | CGAGACGAGATGACATTAACCGGAGA | |
| R3983 Bak1_ | GCTGGGGACCGATCCTGATTGCTCGCTGCGG | 1261 |
| CasPhi32_exon3_sg5 | CGAGACTGGAACTCTGTGTCGTATCT | |
| R3984 Bak1_ | GCTGGGGACCGATCCTGATTGCTCGCTGCGG | 1262 |
| CasPhi32_exon3_sg6 | CGAGACCAGAATTTACTGGAGCAGCT | |
| R3985 Bak1_ | GCTGGGGACCGATCCTGATTGCTCGCTGCGG | 1263 |
| CasPhi32_exon3_sg7 | CGAGACACTGGAGCAGCTGCAGCCCA | |
| R3986 Bak1_ | GCTGGGGACCGATCCTGATTGCTCGCTGCGG | 1264 |
| CasPhi32_exon3_sg8 | CGAGACCCAGCTGTGGGCTGCAGCTG | |
| R3987 Bak1_ | GCTGGGGACCGATCCTGATTGCTCGCTGCGG | 1265 |
| CasPhi32_exon3_sg9 | CGAGACGTAGGCATTCCCAGCTGTGG | |
| R3988 Bak1_ | GCTGGGGACCGATCCTGATTGCTCGCTGCGG | 1266 |
| CasPhi32_exon3_sg10 | CGAGACGTGAAGAGTTCGTAGGCATT | |
| R3989 Bak1_ | GCTGGGGACCGATCCTGATTGCTCGCTGCGG | 1267 |
| CasPhi32_exon3_sg11 | CGAGACACCAAGATTGCCTCCAGGTA | |
| R3990 Bak1_ | GCTGGGGACCGATCCTGATTGCTCGCTGCGG | 1268 |
| CasPhi32_exon3_sg12 | CGAGACCCTCCAGGTACCCACCACCA | |

TABLE U
CasΦ.12 gRNAs targeting Bax in CHO cells

| | Repeat + spacer RNA Sequence | |
|---|---|---|
| Name | (5′→3′), shown as DNA | SEQ ID NO |
| R2458 | CTTTCAAGACTAATAGATTGCTCCTTACGAG | 1269 |
| Bax_CasPhi12_1 | GAGACCTAATGTGGATACTAACTCC | |
| R2459 | CTTTCAAGACTAATAGATTGCTCCTTACGAG | 1270 |
| BaxCasPhi12_2 | GAGACTTCCGTGTGGCAGCTGACAT | |
| R2460 | CTTTCAAGACTAATAGATTGCTCCTTACGAG | 1271 |
| BaxCasPhi12_3 | GAGACCTGATGGCAACTTCAACTGG | |
| R2461 | CTTTCAAGACTAATAGATTGCTCCTTACGAG | 1272 |
| BaxCasPhi12_4 | GAGACTACTTTGCTAGCAAACTGGT | |
| R2462 | CTTTCAAGACTAATAGATTGCTCCTTACGAG | 1273 |
| BaxCasPhi12_5 | GAGACAGCACCAGTTTGCTAGCAAA | |
| R2463 | CTTTCAAGACTAATAGATTGCTCCTTACGAG | 1274 |
| BaxCasPhi12_6 | GAGACAACTGGGGCCGGGTTGTTGC | |
| R2865_Bax_CasPhi12_ | CTTTCAAGACTAATAGATTGCTCCTTACGAG | 1275 |
| nsd_sg1 | GAGACTTCTCTTTCCTGTAGGATGA | |
| R2866_Bax_CasPhi12_ | CTTTCAAGACTAATAGATTGCTCCTTACGAG | 1276 |
| nsd_sg2 | GAGACTCTTTCCTGTAGGATGATTG | |
| R2867_Bax_ | CTTTCAAGACTAATAGATTGCTCCTTACGAG | 1277 |
| CasPhi12_nsd_sg3 | GAGACCCTGTAGGATGATTGCTAAT | |
| R2868_Bax_ | CTTTCAAGACTAATAGATTGCTCCTTACGAG | 1278 |
| CasPhi12_nsd_sg4 | GAGACCTGTAGGATGATTGCTAATG | |
| R2869_Bax_ | CTTTCAAGACTAATAGATTGCTCCTTACGAG | 1279 |
| CasPhi12_nsd_sg5 | GAGACCTAATGTGGATACTAACTCC | |
| R2870_Bax_ | CTTTCAAGACTAATAGATTGCTCCTTACGAG | 1280 |
| CasPhi12_nsd_sg6 | GAGACTTCCGTGTGGCAGCTGACAT | |
| R2871_Bax_ | CTTTCAAGACTAATAGATTGCTCCTTACGAG | 1281 |
| CasPhi12_nsd_sg7 | GAGACCGTGTGGCAGCTGACATGTT | |
| R2872_Bax_ | CTTTCAAGACTAATAGATTGCTCCTTACGAG | 1282 |
| CasPhi12_nsd_sg8 | GAGACCCATCAGCAAACATGTCAGC | |
| R2873_Bax_ | CTTTCAAGACTAATAGATTGCTCCTTACGAG | 1283 |
| CasPhi12_nsd_sg9 | GAGACAAGTTGCCATCAGCAAACAT | |
| R2874_Bax_ | CTTTCAAGACTAATAGATTGCTCCTTACGAG | 1284 |
| CasPhi12_nsd_sg10 | GAGACGCTGATGGCAACTTCAACTG | |
| R2875_Bax_ | CTTTCAAGACTAATAGATTGCTCCTTACGAG | 1285 |
| CasPhi12_nsd_sg11 | GAGACCTGATGGCAACTTCAACTGG | |
| R2876_Bax_ | CTTTCAAGACTAATAGATTGCTCCTTACGAG | 1286 |
| CasPhi12_nsd_sg12 | GAGACAACTGGGGCCGGGTTGTTGC | |
| R2877_Bax_ | CTTTCAAGACTAATAGATTGCTCCTTACGAG | 1287 |
| CasPhi12_nsd_sg13 | GAGACTTGCCCTTTTCTACTTTGCT | |
| R2878_Bax_ | CTTTCAAGACTAATAGATTGCTCCTTACGAG | 1288 |
| CasPhi12_nsd_sg14 | GAGACCCCTTTTCTACTTTGCTAGC | |
| R2879_Bax_ | CTTTCAAGACTAATAGATTGCTCCTTACGAG | 1289 |
| CasPhi12_nsd_sg15 | GAGACCTAGCAAAGTAGAAAAGGGC | |
| R2880_Bax_ | CTTTCAAGACTAATAGATTGCTCCTTACGAG | 1290 |
| CasPhi12_nsd_sg16 | GAGACGCTAGCAAAGTAGAAAAGGG | |
| R2881_Bax_ | CTTTCAAGACTAATAGATTGCTCCTTACGAG | 1291 |
| CasPhi12_nsd_sg17 | GAGACTCTACTTTGCTAGCAAACTG | |
| R2882_Bax_ | CTTTCAAGACTAATAGATTGCTCCTTACGAG | 1292 |
| CasPhi12_nsd_sg18 | GAGACCTACTTTGCTAGCAAACTGG | |
| R2883_Bax_ | CTTTCAAGACTAATAGATTGCTCCTTACGAG | 1293 |
| CasPhi12_nsd_sg19 | GAGACTACTTTGCTAGCAAACTGGT | |
| R2884_Bax_ | CTTTCAAGACTAATAGATTGCTCCTTACGAG | 1294 |
| CasPhi12_nsd_sg20 | GAGACGCTAGCAAACTGGTGCTCAA | |
| R2885_Bax_ | CTTTCAAGACTAATAGATTGCTCCTTACGAG | 1295 |
| CasPhi12_nsd_sg21 | GAGACCTAGCAAACTGGTGCTCAAG | |
| R2886_Bax_ | CTTTCAAGACTAATAGATTGCTCCTTACGAG | 1296 |
| CasPhi12_nsd_sg22 | GAGACAGCACCAGTTTGCTAGCAAA | |

TABLE V
CasΦ.32 gRNAs targeting Bax in CHO cells

| | Repeat + spacer RNA Sequence (5′→3′), | |
|---|---|---|
| Name | shown as DNA | SEQ ID NO |
| R2458 | GCTGGGGACCGATCCTGATTGCTCGCTGCG | 1297 |
| Bax_CasPhi32_1 | GCGAGACCTAATGTGGATACTAACTCC | |
| R2459 | GCTGGGGACCGATCCTGATTGCTCGCTGCG | 1298 |
| Bax_CasPhi32_2 | GCGAGACTTCCGTGTGGCAGCTGACAT | |
| R2460 | GCTGGGGACCGATCCTGATTGCTCGCTGCG | 1299 |
| Bax_CasPhi32_3 | GCGAGACCTGATGGCAACTTCAACTGG | |
| R2461 | GCTGGGGACCGATCCTGATTGCTCGCTGCG | 1300 |
| Bax_CasPhi32_4 | GCGAGACTACTTTGCTAGCAAACTGGT | |
| R2462 | GCTGGGGACCGATCCTGATTGCTCGCTGCG | 1301 |
| Bax_CasPhi32_5 | GCGAGACAGCACCAGTTTGCTAGCAAA | |
| R2463 | GCTGGGGACCGATCCTGATTGCTCGCTGCG | 1302 |
| Bax_CasPhi32_6 | GCGAGACAACTGGGGCCGGGTTGTTGC | |
| R2865_Bax_CasPhi32_ | GCTGGGGACCGATCCTGATTGCTCGCTGCG | 1303 |
| nsd_sg1 | GCGAGACTTCTCTTTCCTGTAGGATGA | |
| R2866_Bax_ | GCTGGGGACCGATCCTGATTGCTCGCTGCG | 1304 |
| CasPhi32_nsd_sg2 | GCGAGACTCTTTCCTGTAGGATGATTG | |
| R2867_Bax_ | GCTGGGGACCGATCCTGATTGCTCGCTGCG | 1305 |
| CasPhi32_nsd_sg3 | GCGAGACCCTGTAGGATGATTGCTAAT | |
| R2868_Bax_ | GCTGGGGACCGATCCTGATTGCTCGCTGCG | 1306 |
| CasPhi32_nsd_sg4 | GCGAGACCTGTAGGATGATTGCTAATG | |
| R2869_Bax_ | GCTGGGGACCGATCCTGATTGCTCGCTGCG | 1307 |
| CasPhi32_nsd_sg5 | GCGAGACCTAATGTGGATACTAACTCC | |
| R2870_Bax_ | GCTGGGGACCGATCCTGATTGCTCGCTGCG | 1308 |
| CasPhi32_nsd_sg6 | GCGAGACTTCCGTGTGGCAGCTGACAT | |
| R2871_Bax_ | GCTGGGGACCGATCCTGATTGCTCGCTGCG | 1309 |
| CasPhi32_nsd_sg7 | GCGAGACCGTGTGGCAGCTGACATGTT | |
| R2872_Bax_ | GCTGGGGACCGATCCTGATTGCTCGCTGCG | 1310 |
| CasPhi32_nsd_sg8 | GCGAGACCCATCAGCAAACATGTCAGC | |
| R2873_Bax_ | GCTGGGGACCGATCCTGATTGCTCGCTGCG | 1311 |
| CasPhi32_nsd_sg9 | GCGAGACAAGTTGCCATCAGCAAACAT | |
| R2874_Bax_ | GCTGGGGACCGATCCTGATTGCTCGCTGCG | 1312 |
| CasPhi32_nsd_sg10 | GCGAGACGCTGATGGCAACTTCAACTG | |
| R2875_Bax_ | GCTGGGGACCGATCCTGATTGCTCGCTGCG | 1313 |
| CasPhi32_nsd_sg11 | GCGAGACCTGATGGCAACTTCAACTGG | |
| R2876_Bax_ | GCTGGGGACCGATCCTGATTGCTCGCTGCG | 1314 |
| CasPhi32_nsd_sg12 | GCGAGACAACTGGGGCCGGGTTGTTGC | |
| R2877_Bax_ | GCTGGGGACCGATCCTGATTGCTCGCTGCG | 1315 |
| CasPhi32_nsd_sg13 | GCGAGACTTGCCCTTTTCTACTTTGCT | |
| R2878_Bax_ | GCTGGGGACCGATCCTGATTGCTCGCTGCG | 1316 |
| CasPhi32_nsd_sg14 | GCGAGACCCCTTTTCTACTTTGCTAGC | |
| R2879_Bax_ | GCTGGGGACCGATCCTGATTGCTCGCTGCG | 1317 |
| CasPhi32_nsd_sg15 | GCGAGACCTAGCAAAGTAGAAAAGGGC | |
| R2880_Bax_ | GCTGGGGACCGATCCTGATTGCTCGCTGCG | 1318 |
| CasPhi32_nsd_sg16 | GCGAGACGCTAGCAAAGTAGAAAAGGG | |
| R2881_Bax_ | GCTGGGGACCGATCCTGATTGCTCGCTGCG | 1319 |
| CasPhi32_nsd_sg17 | GCGAGACTCTACTTTGCTAGCAAACTG | |
| R2882_Bax_ | GCTGGGGACCGATCCTGATTGCTCGCTGCG | 1320 |
| CasPhi32_nsd_sg18 | GCGAGACCTACTTTGCTAGCAAACTGG | |
| R2883_Bax_ | GCTGGGGACCGATCCTGATTGCTCGCTGCG | 1321 |
| CasPhi32_nsd_sg19 | GCGAGACTACTTTGCTAGCAAACTGGT | |
| R2884_Bax_ | GCTGGGGACCGATCCTGATTGCTCGCTGCG | 1322 |
| CasPhi32_nsd_sg20 | GCGAGACGCTAGCAAACTGGTGCTCAA | |
| R2885_Bax_ | GCTGGGGACCGATCCTGATTGCTCGCTGCG | 1323 |
| CasPhi32_nsd_sg21 | GCGAGACCTAGCAAACTGGTGCTCAAG | |
| R2886_Bax_ | GCTGGGGACCGATCCTGATTGCTCGCTGCG | 1324 |
| CasPhi32_nsd_sg22 | GCGAGACAGCACCAGTTTGCTAGCAAA | |

TABLE W
CasΦ.12 gRNAs targeting Fut8 in CHO cells

| | Repeat + spacer RNA Sequence (5′→3′), | |
|---|---|---|
| Name | shown as DNA | SEQ ID NO |
| R2464 | CTTTCAAGACTAATAGATTGCTCCTTACGAG | 1325 |
| Fut8_CasPhi12_1 | GAGACCCACTTTGTCAGTGCGTCTG | |
| R2465 | CTTTCAAGACTAATAGATTGCTCCTTACGAG | 1326 |
| Fut8_CasPhi12_2 | GAGACCTCAATGGGATGGAAGGCTG | |
| R2466 | CTTTCAAGACTAATAGATTGCTCCTTACGAG | 1327 |
| Fut8_CasPhi12_3 | GAGACAGGAATACATGGTACACGTT | |
| R2467 | CTTTCAAGACTAATAGATTGCTCCTTACGAG | 1328 |
| Fut8_CasPhi12_4 | GAGACAAGAACATTTTCAGCTTCTC | |
| R2468 | CTTTCAAGACTAATAGATTGCTCCTTACGAG | 1329 |
| Fut8_CasPhi12_5 | GAGACATCCACTTTCATTCTGCGTT | |
| R2469 | CTTTCAAGACTAATAGATTGCTCCTTACGAG | 1330 |
| Fut8_CasPhi12_6 | GAGACTTTGTTAAAGGAGGCAAAGA | |
| R2887_Fut8_CasPhi12_ | CTTTCAAGACTAATAGATTGCTCCTTACGAG | 1331 |
| nsd_sg1 | GAGACTCCCCAGAGTCCATGTCAGA | |
| R2888_Fut8_ | CTTTCAAGACTAATAGATTGCTCCTTACGAG | 1332 |
| CasPhi12_nsd_sg2 | GAGACTCAGTGCGTCTGACATGGAC | |
| R2889_Fut8_CasPhi12_ | CTTTCAAGACTAATAGATTGCTCCTTACGAG | 1333 |
| nsd_sg3 | GAGACGTCAGTGCGTCTGACATGGA | |
| R2890_Fut8_ | CTTTCAAGACTAATAGATTGCTCCTTACGAG | 1334 |
| CasPhi12_nsd_sg4 | GAGACCCACTTTGTCAGTGCGTCTG | |
| R2891_Fut8_ | CTTTCAAGACTAATAGATTGCTCCTTACGAG | 1335 |
| CasPhi12_nsd_sg5 | GAGACTGTTCCCACTTTGTCAGTGC | |
| R2892_Fut8_ | CTTTCAAGACTAATAGATTGCTCCTTACGAG | 1336 |
| CasPhi12_nsd_sg6 | GAGACCTCAATGGGATGGAAGGCTG | |
| R2893_Fut8_ | CTTTCAAGACTAATAGATTGCTCCTTACGAG | 1337 |
| CasPhi12_nsd_sg7 | GAGACCATCCCATTGAGGAATACAT | |
| R2894_Fut8_ | CTTTCAAGACTAATAGATTGCTCCTTACGAG | 1338 |
| CasPhi12_nsd_sg8 | GAGACAGGAATACATGGTACACGTT | |
| R2895_Fut8_ | CTTTCAAGACTAATAGATTGCTCCTTACGAG | 1339 |
| CasPhi12_nsd_sg9 | GAGACAACGTGTACCATGTATTCCT | |
| R2896_Fut8_ | CTTTCAAGACTAATAGATTGCTCCTTACGAG | 1340 |
| CasPhi12_nsd_sg10 | GAGACTTCAACGTGTACCATGTATT | |
| R2897_Fut8_ | CTTTCAAGACTAATAGATTGCTCCTTACGAG | 1341 |
| CasPhi12_nsd_sg11 | GAGACAAGAACATTTTCAGCTTCTC | |
| R2898_Fut8_ | CTTTCAAGACTAATAGATTGCTCCTTACGAG | 1342 |
| CasPhi12_nsd_sg12 | GAGACGAGAAGCTGAAAATGTTCTT | |
| R2899_Fut8_ | CTTTCAAGACTAATAGATTGCTCCTTACGAG | 1343 |
| CasPhi12_nsd_sg13 | GAGACTCAGCTTCTCGAACGCAGAA | |
| R2900_Fut8_ | CTTTCAAGACTAATAGATTGCTCCTTACGAG | 1344 |
| CasPhi12_nsd_sg14 | GAGACCAGCTTCTCGAACGCAGAAT | |
| R2901_Fut8_ | CTTTCAAGACTAATAGATTGCTCCTTACGAG | 1345 |
| CasPhi12_nsd_sg15 | GAGACTGCGTTCGAGAAGCTGAAAA | |
| R2902_Fut8_ | CTTTCAAGACTAATAGATTGCTCCTTACGAG | 1346 |
| CasPhi12_nsd_sg16 | GAGACAGCTTCTCGAACGCAGAATG | |
| R2903_Fut8_ | CTTTCAAGACTAATAGATTGCTCCTTACGAG | 1347 |
| CasPhi12_nsd_sg17 | GAGACATTCTGCGTTCGAGAAGCTG | |
| R2904_Fut8_ | CTTTCAAGACTAATAGATTGCTCCTTACGAG | 1348 |
| CasPhi12_nsd_sg18 | GAGACCATTCTGCGTTCGAGAAGCT | |
| R2905_Fut8_ | CTTTCAAGACTAATAGATTGCTCCTTACGAG | 1349 |
| CasPhi12_nsd_sg19 | GAGACTCGAACGCAGAATGAAAGTG | |
| R2906_Fut8_ | CTTTCAAGACTAATAGATTGCTCCTTACGAG | 1350 |
| CasPhi12_nsd_sg20 | GAGACATCCACTTTCATTCTGCGTT | |
| R2907_Fut8_ | CTTTCAAGACTAATAGATTGCTCCTTACGAG | 1351 |
| CasPhi12_nsd_sg21 | GAGACTATCCACTTTCATTCTGCGT | |
| R2908_Fut8_ | CTTTCAAGACTAATAGATTGCTCCTTACGAG | 1352 |
| CasPhi12_nsd_sg22 | GAGACTTATCCACTTTCATTCTGCG | |
| R2909_Fut8_ | CTTTCAAGACTAATAGATTGCTCCTTACGAG | 1353 |
| CasPhi12_nsd_sg23 | GAGACTTTATCCACTTTCATTCTGC | |
| R2910_Fut8_ | CTTTCAAGACTAATAGATTGCTCCTTACGAG | 1354 |
| CasPhi12_nsd_sg24 | GAGACTTTTATCCACTTTCATTCTG | |
| R2911_Fut8_ | CTTTCAAGACTAATAGATTGCTCCTTACGAG | 1355 |
| CasPhi12_nsd_sg25 | GAGACAACAAAGAAGGGTCATCAGT | |
| R2912_Fut8_ | CTTTCAAGACTAATAGATTGCTCCTTACGAG | 1356 |
| CasPhi12_nsd_sg26 | GAGACCCTCCTTTAACAAAGAAGGG | |
| R2913_Fut8_ | CTTTCAAGACTAATAGATTGCTCCTTACGAG | 1357 |
| CasPhi12_nsd_sg27 | GAGACGCCTCCTTTAACAAAGAAGG | |
| R2914_Fut8_ | CTTTCAAGACTAATAGATTGCTCCTTACGAG | 1358 |
| CasPhi12_nsd_sg28 | GAGACTTTGTTAAAGGAGGCAAAGA | |
| R2915_Fut8_ | CTTTCAAGACTAATAGATTGCTCCTTACGAG | 1359 |
| CasPhi12_nsd_sg29 | GAGACGTTAAAGGAGGCAAAGACAA | |
| R2916_Fut8_ | CTTTCAAGACTAATAGATTGCTCCTTACGAG | 1360 |
| CasPhi12_nsd_sg30 | GAGACTTAAAGGAGGCAAAGACAAA | |
| R2917_Fut8_ | CTTTCAAGACTAATAGATTGCTCCTTACGAG | 1361 |
| CasPhi12_nsd_sg31 | GAGACTCTTTGCCTCCTTTAACAAA | |
| R2918_Fut8_ | CTTTCAAGACTAATAGATTGCTCCTTACGAG | 1362 |
| CasPhi12_nsd_sg32 | GAGACGTCTTTGCCTCCTTTAACAA | |
| R2919_Fut8_ | CTTTCAAGACTAATAGATTGCTCCTTACGAG | 1363 |
| CasPhi12_nsd_sg33 | GAGACGTCTAACTTACTTTGTCTTT | |
| R2920_Fut8_ | CTTTCAAGACTAATAGATTGCTCCTTACGAG | 1364 |
| CasPhi12_nsd_sg34 | GAGACTTGGTCTAACTTACTTTGTC | |

TABLE X
CasΦ.32 gRNAs targeting Fut8 in CHO cells

| | Repeat + spacer RNA Sequence | |
|---|---|---|
| Name | (5′→3′), shown as DNA | SEQ ID NO |
| R2464 | GCTGGGGACCGATCCTGATTGCTCGCTGCG | 1365 |
| Fut8_CasPhi32_1 | GCGAGACCCACTTTGTCAGTGCGTCTG | |
| R2465 | GCTGGGGACCGATCCTGATTGCTCGCTGCG | 1366 |
| Fut8_CasPhi32_2 | GCGAGACCTCAATGGGATGGAAGGCTG | |
| R2466 | GCTGGGGACCGATCCTGATTGCTCGCTGCG | 1367 |
| Fut8_CasPhi32_3 | GCGAGACAGGAATACATGGTACACGTT | |
| R2467 | GCTGGGGACCGATCCTGATTGCTCGCTGCG | 1368 |
| Fut8_CasPhi32_4 | GCGAGACAAGAACATTTTCAGCTTCTC | |
| R2468 | GCTGGGGACCGATCCTGATTGCTCGCTGCG | 1369 |
| Fut8_CasPhi32_5 | GCGAGACATCCACTTTCATTCTGCGTT | |
| R2469 | GCTGGGGACCGATCCTGATTGCTCGCTGCG | 1370 |
| Fut8_CasPhi32_6 | GCGAGACTTTGTTAAAGGAGGCAAAGA | |
| R2887_Fut8_CasPhi32_ | GCTGGGGACCGATCCTGATTGCTCGCTGCG | 1371 |
| nsd_sg1 | GCGAGACTCCCCAGAGTCCATGTCAGA | |
| R2888_Fut8_ | GCTGGGGACCGATCCTGATTGCTCGCTGCG | 1372 |
| CasPhi32_nsd_sg2 | GCGAGACTCAGTGCGTCTGACATGGAC | |
| R2889_Fut8_ | GCTGGGGACCGATCCTGATTGCTCGCTGCG | 1373 |
| CasPhi32_nsd_sg3 | GCGAGACGTCAGTGCGTCTGACATGGA | |
| R2890_Fut8_ | GCTGGGGACCGATCCTGATTGCTCGCTGCG | 1374 |
| CasPhi32_nsd_sg4 | GCGAGACCCACTTTGTCAGTGCGTCTG | |
| R2891_Fut8_ | GCTGGGGACCGATCCTGATTGCTCGCTGCG | 1375 |
| CasPhi32_nsd_sg5 | GCGAGACTGTTCCCACTTTGTCAGTGC | |
| R2892_Fut8_ | GCTGGGGACCGATCCTGATTGCTCGCTGCG | 1376 |
| CasPhi32_nsd_sg6 | GCGAGACCTCAATGGGATGGAAGGCTG | |
| R2893_Fut8_ | GCTGGGGACCGATCCTGATTGCTCGCTGCG | 1377 |
| CasPhi32_nsd_sg7 | GCGAGACCATCCCATTGAGGAATACAT | |
| R2894_Fut8_ | GCTGGGGACCGATCCTGATTGCTCGCTGCG | 1378 |
| CasPhi32_nsd_sg8 | GCGAGACAGGAATACATGGTACACGTT | |
| R2895_Fut8_ | GCTGGGGACCGATCCTGATTGCTCGCTGCG | 1379 |
| CasPhi32_nsd_sg9 | GCGAGACAACGTGTACCATGTATTCCT | |
| R2896_Fut8_ | GCTGGGGACCGATCCTGATTGCTCGCTGCG | 1380 |
| CasPhi32_nsd_sg10 | GCGAGACTTCAACGTGTACCATGTATT | |
| R2897_Fut8_ | GCTGGGGACCGATCCTGATTGCTCGCTGCG | 1381 |
| CasPhi32_nsd_sg11 | GCGAGACAAGAACATTTTCAGCTTCTC | |
| R2898_Fut8_ | GCTGGGGACCGATCCTGATTGCTCGCTGCG | 1382 |
| CasPhi32_nsd_sg12 | GCGAGACGAGAAGCTGAAAATGTTCTT | |
| R2899_Fut8_ | GCTGGGGACCGATCCTGATTGCTCGCTGCG | 1383 |
| CasPhi32_nsd_sg13 | GCGAGACTCAGCTTCTCGAACGCAGAA | |
| R2900_Fut8_ | GCTGGGGACCGATCCTGATTGCTCGCTGCG | 1384 |
| CasPhi32_nsd_sg14 | GCGAGACCAGCTTCTCGAACGCAGAAT | |
| R2901_Fut8_ | GCTGGGGACCGATCCTGATTGCTCGCTGCG | 1385 |
| CasPhi32_nsd_sg15 | GCGAGACTGCGTTCGAGAAGCTGAAAA | |
| R2902_Fut8_ | GCTGGGGACCGATCCTGATTGCTCGCTGCG | 1386 |
| CasPhi32_nsd_sg16 | GCGAGACAGCTTCTCGAACGCAGAATG | |
| R2903_Fut8_ | GCTGGGGACCGATCCTGATTGCTCGCTGCG | 1387 |
| CasPhi32_nsd_sg17 | GCGAGACATTCTGCGTTCGAGAAGCTG | |
| R2904_Fut8_ | GCTGGGGACCGATCCTGATTGCTCGCTGCG | 1388 |
| CasPhi32_nsd_sg18 | GCGAGACCATTCTGCGTTCGAGAAGCT | |
| R2905_Fut8_ | GCTGGGGACCGATCCTGATTGCTCGCTGCG | 1389 |
| CasPhi32_nsd_sg19 | GCGAGACTCGAACGCAGAATGAAAGTG | |
| R2906_Fut8_ | GCTGGGGACCGATCCTGATTGCTCGCTGCG | 1390 |
| CasPhi32_ | GCGAGACATCCACTTTCATTCTGCGTT | |
| CasPhi32_nsd_sg20 | | |
| R2907_Fut8_ | GCTGGGGACCGATCCTGATTGCTCGCTGCG | 1391 |
| CasPhi32_nsd_sg21 | GCGAGACTATCCACTTTCATTCTGCGT | |
| R2908_Fut8_ | GCTGGGGACCGATCCTGATTGCTCGCTGCG | 1392 |
| CasPhi32_nsd_sg22 | GCGAGACTTATCCACTTTCATTCTGCG | |
| R2909_Fut8_ | GCTGGGGACCGATCCTGATTGCTCGCTGCG | 1393 |
| CasPhi32_nsd_sg23 | GCGAGACTTTATCCACTTTCATTCTGC | |
| R2910_Fut8_ | GCTGGGGACCGATCCTGATTGCTCGCTGCG | 1394 |
| CasPhi32_nsd_sg24 | GCGAGACTTTTATCCACTTTCATTCTG | |
| R2911_Fut8_ | GCTGGGGACCGATCCTGATTGCTCGCTGCG | 1395 |
| CasPhi32_nsd_sg25 | GCGAGACAACAAAGAAGGGTCATCAGT | |
| R2912_Fut8_ | GCTGGGGACCGATCCTGATTGCTCGCTGCG | 1396 |
| CasPhi32_nsd_sg26 | GCGAGACCCTCCTTTAACAAAGAAGGG | |
| R2913_Fut8_ | GCTGGGGACCGATCCTGATTGCTCGCTGCG | 1397 |
| CasPhi32_nsd_sg27 | GCGAGACGCCTCCTTTAACAAAGAAGG | |
| R2914_Fut8_ | GCTGGGGACCGATCCTGATTGCTCGCTGCG | 1398 |
| CasPhi32_nsd_sg28 | GCGAGACTTTGTTAAAGGAGGCAAAGA | |
| R2915_Fut8_ | GCTGGGGACCGATCCTGATTGCTCGCTGCG | 1399 |
| CasPhi32_nsd_sg29 | GCGAGACGTTAAAGGAGGCAAAGACAA | |
| R2916_Fut8_ | GCTGGGGACCGATCCTGATTGCTCGCTGCG | 1400 |
| CasPhi32_nsd_sg30 | GCGAGACTTAAAGGAGGCAAAGACAAA | |
| R2917_Fut8_ | GCTGGGGACCGATCCTGATTGCTCGCTGCG | 1401 |
| CasPhi32_nsd_sg31 | GCGAGACTCTTTGCCTCCTTTAACAAA | |
| R2918_Fut8_ | GCTGGGGACCGATCCTGATTGCTCGCTGCG | 1402 |
| CasPhi32_nsd_sg32 | GCGAGACGTCTTTGCCTCCTTTAACAA | |
| R2919_Fut8_ | GCTGGGGACCGATCCTGATTGCTCGCTGCG | 1403 |
| CasPhi32_nsd_sg33 | GCGAGACGTCTAACTTACTTTGTCTTT | |
| R2920_Fut8_ | GCTGGGGACCGATCCTGATTGCTCGCTGCG | 1404 |
| CasPhi32_nsd_sg34 | GCGAGACTTGGTCTAACTTACTTTGTC | |

TABLE Y
CasΦ.12 gRNAs targeting human TRAC in T cells

| | Repeat + spacer RNA Sequence | |
|---|---|---|
| Name | (5′→3′), shown as DNA | SEQ ID NO |
| R3040_CasPhi12_S | ATTGCTCCTTACGAGGAGACTGGATATCTGT | 1533 |
| | GGGACA | |
| R3041_CasPhi12_S | ATTGCTCCTTACGAGGAGACTCCCACAGATA | 1534 |
| | TCCAGA | |
| R3042_CasPhi12_S | ATTGCTCCTTACGAGGAGACGAGTCTCTCAG | 1535 |
| | CTGGTA | |
| R3043_CasPhi12_S | ATTGCTCCTTACGAGGAGACAGAGTCTCTCA | 1536 |
| | GCTGGT | |
| R3044_CasPhi12_S | ATTGCTCCTTACGAGGAGACTCACTGGATTT | 1537 |
| | AGAGTC | |
| R3045_CasPhi12_S | ATTGCTCCTTACGAGGAGACAGAATCAAAAT | 1538 |
| | CGGTGA | |
| R3046_CasPhi12_S | ATTGCTCCTTACGAGGAGACGAGAATCAAAA | 1539 |
| | TCGGTG | |
| R3047_CasPhi12_S | ATTGCTCCTTACGAGGAGACACCGATTTTGA | 1540 |
| | TTCTCA | |
| R3048_CasPhi12_S | ATTGCTCCTTACGAGGAGACTTTGAGAATCA | 1541 |
| | AAATCG | |
| R3049_CasPhi12_S | ATTGCTCCTTACGAGGAGACGTTTGAGAATC | 1542 |
| | AAAATC | |
| R3050_CasPhi12_S | ATTGCTCCTTACGAGGAGACTGATTCTCAAA | 1543 |
| | CAAATG | |
| R3051_CasPhi12_S | ATTGCTCCTTACGAGGAGACGATTCTCAAAC | 1544 |
| | AAATGT | |
| R3052_CasPhi12_S | ATTGCTCCTTACGAGGAGACATTCTCAAACA | 1545 |
| | AATGTG | |
| R3053_CasPhi12_S | ATTGCTCCTTACGAGGAGACTGACACATTTG | 1546 |
| | TTTGAG | |
| R3054_CasPhi12_S | ATTGCTCCTTACGAGGAGACTCAAACAAATG | 1547 |
| | TGTCAC | |
| R3055_CasPhi12_S | ATTGCTCCTTACGAGGAGACGTGACACATTT | 1548 |
| | GTTTGA | |
| R3056_CasPhi12_S | ATTGCTCCTTACGAGGAGACCTTTGTGACAC | 1549 |
| | ATTTGT | |
| R3057_CasPhi12_S | ATTGCTCCTTACGAGGAGACTGATGTGTATA | 1550 |
| | TCACAG | |
| R3058_CasPhi12_S | ATTGCTCCTTACGAGGAGACTCTGTGATATA | 1551 |
| | CACATC | |
| R3059_CasPhi12_S | ATTGCTCCTTACGAGGAGACGTCTGTGATAT | 1552 |
| | ACACAT | |
| R3060_CasPhi12_S | ATTGCTCCTTACGAGGAGACTGTCTGTGATA | 1553 |
| | TACACA | |
| R3061_CasPhi12_S | ATTGCTCCTTACGAGGAGACAAGTCCATAGA | 1554 |
| | CCTCAT | |
| R3062_CasPhi12_S | ATTGCTCCTTACGAGGAGACCTCTTGAAGTC | 1555 |
| | CATAGA | |
| R3063_CasPhi12_S | ATTGCTCCTTACGAGGAGACAAGAGCAACAG | 1556 |
| | TGCTGT | |
| R3064_CasPhi12_S | ATTGCTCCTTACGAGGAGACCTCCAGGCCAC | 1557 |
| | AGCACT | |
| R3065_CasPhi12_S | ATTGCTCCTTACGAGGAGACTTGCTCCAGGC | 1558 |
| | CACAGC | |
| R3066_CasPhi12_S | ATTGCTCCTTACGAGGAGACGTTGCTCCAGG | 1559 |
| | CCACAG | |
| R3067_CasPhi12_S | ATTGCTCCTTACGAGGAGACCACATGCAAAG | 1560 |
| | TCAGAT | |
| R3068_CasPhi12_S | ATTGCTCCTTACGAGGAGACGCACATGCAAA | 1561 |
| | GTCAGA | |
| R3069_CasPhi12_S | ATTGCTCCTTACGAGGAGACGCATGTGCAAA | 1562 |
| | CGCCTT | |
| R3070_CasPhi12_S | ATTGCTCCTTACGAGGAGACAAGGCGTTTGC | 1563 |
| | ACATGC | |
| R3071_CasPhi12_S | ATTGCTCCTTACGAGGAGACCATGTGCAAAC | 1564 |
| | GCCTTC | |
| R3072_CasPhi12_S | ATTGCTCCTTACGAGGAGACTTGAAGGCGTT | 1565 |
| | TGCACA | |
| R3073_CasPhi12_S | ATTGCTCCTTACGAGGAGACAACAACAGCAT | 1566 |
| | TATTCC | |
| R3074_CasPhi12_S | ATTGCTCCTTACGAGGAGACTGGAATAATGC | 1567 |
| | TGTTGT | |
| R3075_CasPhi12_S | ATTGCTCCTTACGAGGAGACTTCCAGAAGAC | 1568 |
| | ACCTTC | |
| R3076_CasPhi12_S | ATTGCTCCTTACGAGGAGACCAGAAGACACC | 1569 |
| | TTCTTC | |
| R3077_CasPhi12_S | ATTGCTCCTTACGAGGAGACCCTGGGCTGGG | 1570 |
| | GAAGAA | |
| R3078_CasPhi12_S | ATTGCTCCTTACGAGGAGACTTCCCCAGCCC | 1571 |
| | AGGTAA | |
| R3079_CasPhi12_S | ATTGCTCCTTACGAGGAGACCCCAGCCCAGG | 1572 |
| | TAAGGG | |
| R3080_CasPhi12_S | ATTGCTCCTTACGAGGAGACTAAAAGGAAAA | 1573 |
| | ACAGAC | |
| R3081_CasPhi12_S | ATTGCTCCTTACGAGGAGACCTAAAAGGAAA | 1574 |
| | AACAGA | |
| R3082_CasPhi12_S | ATTGCTCCTTACGAGGAGACTTCCTTTTAGAA | 1575 |
| | AGTTC | |
| R3083_CasPhi12_S | ATTGCTCCTTACGAGGAGACTCCTTTTAGAA | 1576 |
| | AGTTCC | |
| R3084_CasPhi12_S | ATTGCTCCTTACGAGGAGACCCTTTTAGAAA | 1577 |
| | GTTCCT | |
| R3085_CasPhi12_S | ATTGCTCCTTACGAGGAGACCTTTTAGAAAG | 1578 |
| | TTCCTG | |
| R3086_CasPhi12_S | ATTGCTCCTTACGAGGAGACTAGAAAGTTCC | 1579 |
| | TGTGAT | |
| R3136_CasPhi12_S | ATTGCTCCTTACGAGGAGACAGAAAGTTCCT | 1580 |
| | GTGATG | |
| R3137_CasPhi12_S | ATTGCTCCTTACGAGGAGACGAAAGTTCCTG | 1581 |
| | TGATGT | |
| R3138_CasPhi12_S | ATTGCTCCTTACGAGGAGACACATCACAGGA | 1582 |
| | ACTTTC | |
| R3139_CasPhi12_S | ATTGCTCCTTACGAGGAGACCTGTGATGTCA | 1583 |
| | AGCTGG | |
| R3140_CasPhi12_S | ATTGCTCCTTACGAGGAGACTCGACCAGCTT | 1584 |
| | GACATC | |
| R3141_CasPhi12_S | ATTGCTCCTTACGAGGAGACCTCGACCAGCT | 1585 |
| | TGACAT | |
| R3142_CasPhi12_S | ATTGCTCCTTACGAGGAGACTCTCGACCAGC | 1586 |
| | TTGACA | |
| R3143_CasPhi12_S | ATTGCTCCTTACGAGGAGACAAAGCTTTTCT | 1587 |
| | CGACCA | |
| R3144_CasPhi12_S | ATTGCTCCTTACGAGGAGACCAAAGCTTTTC | 1588 |
| | TCGACC | |
| R3145_CasPhi12_S | ATTGCTCCTTACGAGGAGACCCTGTTTCAAA | 1589 |
| | GCTTTT | |
| R3146_CasPhi12_S | ATTGCTCCTTACGAGGAGACGAAACAGGTAA | 1590 |
| | GACAGG | |
| R3147_CasPhi12_S | ATTGCTCCTTACGAGGAGACAAACAGGTAAG | 1591 |
| | ACAGGG | |

TABLE Z
CasΦ.12 gRNAs targeting human B2M in T cells

| | Repeat + spacer RNA Sequence | |
|---|---|---|
| Name | (5′→3′), shown as DNA | SEQ ID NO |
| R3115_CasPhi12_S | ATTGCTCCTTACGAGGAGACCATCCATCCGA | 1592 |
| | CATTGA | |
| R3116_CasPhi12_S | ATTGCTCCTTACGAGGAGACATCCATCCGAC | 1593 |
| | ATTGAA | |
| R3117_CasPhi12_S | ATTGCTCCTTACGAGGAGACAGTAAGTCAAC | 1594 |
| | TTCAAT | |
| R3118_CasPhi12_S | ATTGCTCCTTACGAGGAGACTTCAGTAAGTC | 1595 |
| | AACTTC | |
| R3119_CasPhi12_S | ATTGCTCCTTACGAGGAGACAAGTTGACTTA | 1596 |
| | CTGAAG | |
| R3120_CasPhi12_S | ATTGCTCCTTACGAGGAGACACTTACTGAAG | 1597 |
| | AATGGA | |
| R3121_CasPhi12_S | ATTGCTCCTTACGAGGAGACTCTCTCCATTCT | 1598 |
| | TCAGT | |
| R3122_CasPhi12_S | ATTGCTCCTTACGAGGAGACCTGAAGAATGG | 1599 |
| | AGAGAG | |
| R3123_CasPhi12_S | ATTGCTCCTTACGAGGAGACAATTCTCTCTCC | 1600 |
| | ATTCT | |
| R3124_CasPhi12_S | ATTGCTCCTTACGAGGAGACCAATTCTCTCTC | 1601 |
| | CATTC | |
| R3125_CasPhi12_S | ATTGCTCCTTACGAGGAGACTCAATTCTCTCT | 1602 |
| | CCATT | |
| R3126_CasPhi12_S | ATTGCTCCTTACGAGGAGACTTCAATTCTCTC | 1603 |
| | TCCAT | |
| R3127_CasPhi12_S | ATTGCTCCTTACGAGGAGACAAAAAGTGGAG | 1604 |
| | CATTCA | |
| R3128_CasPhi12_S | ATTGCTCCTTACGAGGAGACCTGAAAGACAA | 1605 |
| | GTCTGA | |
| R3129_CasPhi12_S | ATTGCTCCTTACGAGGAGACAGACTTGTCTTT | 1606 |
| | CAGCA | |
| R3130_CasPhi12_S | ATTGCTCCTTACGAGGAGACTCTTTCAGCAA | 1607 |
| | GGACTG | |
| R3131_CasPhi12_S | ATTGCTCCTTACGAGGAGACCAGCAAGGACT | 1608 |
| | GGTCTT | |
| R3132_CasPhi12_S | ATTGCTCCTTACGAGGAGACAGCAAGGACTG | 1609 |
| | GTCTTT | |
| R3133_CasPhi12_S | ATTGCTCCTTACGAGGAGACCTATCTCTTGTA | 1610 |
| | CTACA | |
| R3134_CasPhi12_S | ATTGCTCCTTACGAGGAGACTATCTCTTGTAC | 1611 |
| | TACAC | |
| R3135_CasPhi12_S | ATTGCTCCTTACGAGGAGACAGTGTAGTACA | 1612 |
| | AGAGAT | |
| R3148_CasPhi12_S | ATTGCTCCTTACGAGGAGACTACTACACTGA | 1613 |
| | ATTCAC | |
| R3149_CasPhi12_S | ATTGCTCCTTACGAGGAGACAGTGGGGGTGA | 1614 |
| | ATTCAG | |
| R3150_CasPhi12_S | ATTGCTCCTTACGAGGAGACCAGTGGGGGTG | 1615 |
| | AATTCA | |
| R3151_CasPhi12_S | ATTGCTCCTTACGAGGAGACTCAGTGGGGGT | 1616 |
| | GAATTC | |
| R3152_CasPhi12_S | ATTGCTCCTTACGAGGAGACTTCAGTGGGGG | 1617 |
| | TGAATT | |
| R3153_CasPhi12_S | ATTGCTCCTTACGAGGAGACACCCCCACTGA | 1618 |
| | AAAAGA | |
| R3154_CasPhi12_S | ATTGCTCCTTACGAGGAGACACACGGCAGGC | 1619 |
| | ATACTC | |
| R3155_CasPhi12_S | ATTGCTCCTTACGAGGAGACGGCTGTGACAA | 1620 |
| | AGTCAC | |
| R3156_CasPhi12_S | ATTGCTCCTTACGAGGAGACGTCACAGCCCA | 1621 |
| | AGATAG | |
| R3157_CasPhi12_S | ATTGCTCCTTACGAGGAGACTCACAGCCCAA | 1622 |
| | GATAGT | |
| R3158_CasPhi12_S | ATTGCTCCTTACGAGGAGACACTATCTTGGG | 1623 |
| | CTGTGA | |
| R3159_CasPhi12_S | ATTGCTCCTTACGAGGAGACCCCCACTTAAC | 1624 |
| | TATCTT | |

TABLE AA
CasΦ.12 gRNAs targeting human PD1 in T cells

| Name | Repeat + spacer RNA Sequence (5′→3′) | SEQ ID NO |
|---|---|---|
| R2921_CasPhi12_S | AUUGCUCCUUACGAGGAGACCCUUCCGC | 1625 |
| | UCACCUCCG | |
| R2922_CasPhi12_S | AUUGCUCCUUACGAGGAGACCCUUCCGC | 1626 |
| | UCACCUCCG | |
| R2923_CasPhi12_S | AUUGCUCCUUACGAGGAGACCGCUCACC | 1627 |
| | UCCGCCUGA | |
| R2924_CasPhi12_S | AUUGCUCCUUACGAGGAGACUCCACUGC | 1628 |
| | UCAGGCGGA | |
| R2925_CasPhi12_S | AUUGCUCCUUACGAGGAGACUAGCACCG | 1629 |
| | CCCAGACGA | |
| R2926_CasPhi12_S | AUUGCUCCUUACGAGGAGACAGGCAUGC | 1630 |
| | AGAUCCCAC | |
| R2927_CasPhi12_S | AUUGCUCCUUACGAGGAGACCACAGGCG | 1631 |
| | CCCUGGCCA | |
| R2928_CasPhi12_S | AUUGCUCCUUACGAGGAGACUCUGGGCG | 1632 |
| | GUGCUACAA | |
| R2929_CasPhi12_S | AUUGCUCCUUACGAGGAGACGCAUGCCU | 1633 |
| | GGAGCAGCC | |
| R2930_CasPhi12_S | AUUGCUCCUUACGAGGAGACUAGCACCG | 1634 |
| | CCCAGACGA | |
| R2931_CasPhi12_S | AUUGCUCCUUACGAGGAGACUGGCCGCC | 1635 |
| | AGCCCAGUU | |
| R2932_CasPhi12_S | AUUGCUCCUUACGAGGAGACCUUCCGCU | 1636 |
| | CACCUCCGC | |
| R2933_CasPhi12_S | AUUGCUCCUUACGAGGAGACCAGGGCCU | 1637 |
| | GUCUGGGGA | |
| R2934_CasPhi12_S | AUUGCUCCUUACGAGGAGACUCCCCAGC | 1638 |
| | CCUGCUCGU | |
| R2935_CasPhi12_S | AUUGCUCCUUACGAGGAGACGGUCACCA | 1639 |
| | CGAGCAGGG | |
| R2936_CasPhi12_S | AUUGCUCCUUACGAGGAGACUCCCCUUC | 1640 |
| | GGUCACCAC | |
| R2937_CasPhi12_S | AUUGCUCCUUACGAGGAGACGAGAAGCU | 1641 |
| | GCAGGUGAA | |
| R2938_CasPhi12_S | AUUGCUCCUUACGAGGAGACACCUGCAG | 1642 |
| | CUUCUCCAA | |
| R2939_CasPhi12_S | AUUGCUCCUUACGAGGAGACUCCAACAC | 1643 |
| | AUCGGAGAG | |
| R2940_CasPhi12_S | AUUGCUCCUUACGAGGAGACGCACGAAG | 1644 |
| | CUCUCCGAU | |
| R2941_CasPhi12_S | AUUGCUCCUUACGAGGAGACAGCACGAA | 1645 |
| | GCUCUCCGA | |
| R2942_CasPhi12_S | AUUGCUCCUUACGAGGAGACGUGCUAAA | 1646 |
| | CUGGUACCG | |
| R2943_CasPhi12_S | AUUGCUCCUUACGAGGAGACCUGGGGCU | 1647 |
| | CAUGCGGUA | |
| R2944_CasPhi12_S | AUUGCUCCUUACGAGGAGACUCCGUCUG | 1648 |
| | GUUGCUGGG | |
| R2945_CasPhi12_S | AUUGCUCCUUACGAGGAGACCCCGAGGA | 1649 |
| | CCGCAGCCA | |
| R2946_CasPhi12_S | AUUGCUCCUUACGAGGAGACUGUGACAC | 1650 |
| | GGAAGCGGC | |
| R2947_CasPhi12_S | AUUGCUCCUUACGAGGAGACCGUGUCAC | 1651 |
| | ACAACUGCC | |
| R2948_CasPhi12_S | AUUGCUCCUUACGAGGAGACGGCAGUUG | 1652 |
| | UGUGACACG | |
| R2949_CasPhi12_S | AUUGCUCCUUACGAGGAGACCACAUGAG | 1653 |
| | CGUGGUCAG | |
| R2950_CasPhi12_S | AUUGCUCCUUACGAGGAGACCGCCGGGC | 1654 |
| | CCUGACCAC | |
| R2951_CasPhi12_S | AUUGCUCCUUACGAGGAGACGGGGCCAG | 1655 |
| | GGAGAUGGC | |
| R2952_CasPhi12_S | AUUGCUCCUUACGAGGAGACAUCUGCGC | 1656 |
| | CUUGGGGGC | |
| R2953_CasPhi12_S | AUUGCUCCUUACGAGGAGACGAUCUGCG | 1657 |
| | CCUUGGGGG | |
| R2954_CasPhi12_S | AUUGCUCCUUACGAGGAGACCCAGACAG | 1658 |
| | GCCCUGGAA | |
| R2955_CasPhi12_S | AUUGCUCCUUACGAGGAGACCCAGCCCU | 1659 |
| | GCUCGUGGU | |
| R2956_CasPhi12_S | AUUGCUCCUUACGAGGAGACUCUCUGGA | 1660 |
| | AGGGCACAA | |
| R2957_CasPhi12_S | AUUGCUCCUUACGAGGAGACGUGCCCUU | 1661 |
| | CCAGAGAGA | |
| R2958_CasPhi12_S | AUUGCUCCUUACGAGGAGACUGCCCUUC | 1662 |
| | CAGAGAGAA | |
| R2959_CasPhi12_S | AUUGCUCCUUACGAGGAGACUGCCCUUC | 1663 |
| | UCUCUGGAA | |
| R2960_CasPhi12_S | AUUGCUCCUUACGAGGAGACCAGAGAGA | 1664 |
| | AGGGCAGAA | |
| R2961_CasPhi12_S | AUUGCUCCUUACGAGGAGACGAACUGGC | 1665 |
| | CGGCUGGCC | |
| R2962_CasPhi12_S | AUUGCUCCUUACGAGGAGACGGAACUGG | 1666 |
| | CCGGCUGGC | |
| R2963_CasPhi12_S | AUUGCUCCUUACGAGGAGACCAAACCCU | 1667 |
| | GGUGGUUGG | |
| R2964_CasPhi12_S | AUUGCUCCUUACGAGGAGACGUGUCGUG | 1668 |
| | GGCGGCCUG | |
| R2965_CasPhi12_S | AUUGCUCCUUACGAGGAGACCCUCGUGC | 1669 |
| | GGCCCGGGA | |
| R2966_CasPhi12_S | AUUGCUCCUUACGAGGAGACUCCCUGCA | 1670 |
| | GAGAAACAC | |
| R2967_CasPhi12_S | AUUGCUCCUUACGAGGAGACCUCUGCAG | 1671 |
| | GGACAAUAG | |
| R2968_CasPhi12_S | AUUGCUCCUUACGAGGAGACUCUGCAGG | 1672 |
| | GACAAUAGG | |
| R2969_CasPhi12_S | AUUGCUCCUUACGAGGAGACCUCCUCAA | 1673 |
| | AGAAGGAGG | |
| R2970_CasPhi12_S | AUUGCUCCUUACGAGGAGACUCCUCAAA | 1674 |
| | GAAGGAGGA | |
| R2971_CasPhi12_S | AUUGCUCCUUACGAGGAGACUCUGUGGA | 1675 |
| | CUAUGGGGA | |
| R2972_CasPhi12_S | AUUGCUCCUUACGAGGAGACUCUCGCCA | 1676 |
| | CUGGAAAUC | |
| R2973_CasPhi12_S | AUUGCUCCUUACGAGGAGACCCAGUGGC | 1677 |
| | GAGAGAAGA | |
| R2974_CasPhi12_S | AUUGCUCCUUACGAGGAGACCAGUGGCG | 1678 |
| | AGAGAAGAC | |
| R2975_CasPhi12_S | AUUGCUCCUUACGAGGAGACCGCUAGGA | 1679 |
| | AAGACAAUG | |
| R2976_CasPhi12_S | AUUGCUCCUUACGAGGAGACUCUUUCCU | 1680 |
| | AGCGGAAUG | |
| R2977_CasPhi12_S | AUUGCUCCUUACGAGGAGACCCUAGCGG | 1681 |
| | AAUGGGCAC | |
| R2978_CasPhi12_S | AUUGCUCCUUACGAGGAGACCUAGCGGA | 1682 |
| | AUGGGCACC | |
| R2979_CasPhi12_S | AUUGCUCCUUACGAGGAGACGCCCCUCU | 1683 |
| | GACCGGCUU | |
| R2980_CasPhi12_S | AUUGCUCCUUACGAGGAGACCUUGGCCA | 1684 |
| | CCAGUGUUC | |
| R2981_CasPhi12_S | AUUGCUCCUUACGAGGAGACGCCACCAG | 1685 |
| | UGUUCUGCA | |
| R2982_CasPhi12_S | AUUGCUCCUUACGAGGAGACUGCAGACC | 1686 |
| | CUCCACCAU | |
| R2983_CasPhi12_S | AUUGCUCCUUACGAGGAGACUCCUGAGG | 1687 |
| | AAAUGCGCU | |
| R2984_CasPhi12_S | AUUGCUCCUUACGAGGAGACCCUCAGGA | 1688 |
| | GAAGCAGGC | |
| R2985_CasPhi12_S | AUUGCUCCUUACGAGGAGACCUCAGGAG | 1689 |
| | AAGCAGGCA | |
| R2986_CasPhi12_S | AUUGCUCCUUACGAGGAGACCAGGCCGU | 1690 |
| | CCAGGGGCU | |
| R2987_CasPhi12_S | AUUGCUCCUUACGAGGAGACAGACAUGA | 1691 |
| | GUCCUGUGG | |
| R2988_CasPhi12_S | AUUGCUCCUUACGAGGAGACAGGUCCUG | 1692 |
| | CCAGCACAG | |
| R2989_CasPhi12_S | AUUGCUCCUUACGAGGAGACAGGGAGCU | 1693 |
| | GGACGCAGG | |
| R2990_CasPhi12_S | AUUGCUCCUUACGAGGAGACAGCCCCGG | 1694 |
| | GCCGCAGGC | |
| R2991_CasPhi12_S | AUUGCUCCUUACGAGGAGACAGGCAGGA | 1695 |
| | GGCUCCGGG | |
| R2992_CasPhi12_S | AUUGCUCCUUACGAGGAGACGGGGCUGG | 1696 |
| | UUGGAGAUG | |
| R2993_CasPhi12_S | AUUGCUCCUUACGAGGAGACGAGAUGGC | 1697 |
| | CUUGGAGCA | |
| R2994_CasPhi12_S | AUUGCUCCUUACGAGGAGACGCUGCUCC | 1698 |
| | AAGGCCAUC | |
| R2995_CasPhi12_S | AUUGCUCCUUACGAGGAGACGAGCAGCC | 1699 |
| | AAGGUGCCC | |
| R2996_CasPhi12_S | AUUGCUCCUUACGAGGAGACGGGAUGCC | 1700 |
| | ACUGCCAGG | |
| R2997_CasPhi12_S | AUUGCUCCUUACGAGGAGACCGGGAUGC | 1701 |
| | CACUGCCAG | |
| R2998_CasPhi12_S | AUUGCUCCUUACGAGGAGACGGCCCUGC | 1702 |
| | GUCCAGGGC | |
| R2999_CasPhi12_S | AUUGCUCCUUACGAGGAGACUCUGCUCC | 1703 |
| | CUGCAGGCC | |
| R3000_CasPhi12_S | AUUGCUCCUUACGAGGAGACUCUAGGCC | 1704 |
| | UGCAGGGAG | |
| R3001_CasPhi12_S | AUUGCUCCUUACGAGGAGACCCUGAAAC | 1705 |
| | UUCUCUAGG | |
| R3002_CasPhi12_S | AUUGCUCCUUACGAGGAGACUGACCUUC | 1706 |
| | CCUGAAACU | |
| R3003_CasPhi12_S | AUUGCUCCUUACGAGGAGACCAGGGAAG | 1707 |
| | GUCAGAAGA | |
| R3004_CasPhi12_S | AUUGCUCCUUACGAGGAGACAGGGAAGG | 1708 |
| | UCAGAAGAG | |
| R3005_CasPhi12_S | AUUGCUCCUUACGAGGAGACCUGCCCUG | 1709 |
| | CCCACCACA | |
| R3006_CasPhi12_S | AUUGCUCCUUACGAGGAGACCCUGCCCU | 1710 |
| | GCCCACCAC | |
| R3007_CasPhi12_S | AUUGCUCCUUACGAGGAGACACACAUGC | 1711 |
| | CCAGGCAGC | |
| R3008_CasPhi12_S | AUUGCUCCUUACGAGGAGACCACAUGCC | 1712 |
| | CAGGCAGCA | |
| R3009_CasPhi12_S | AUUGCUCCUUACGAGGAGACCCUGCCCC | 1713 |
| | ACAAAGGGC | |
| R3010_CasPhi12_S | AUUGCUCCUUACGAGGAGACGUGGGGCA | 1714 |
| | GGGAAGCUG | |
| R3011_CasPhi12_S | AUUGCUCCUUACGAGGAGACUGGGGCAG | 1715 |
| | GGAAGCUGA | |
| R3012_CasPhi12_S | AUUGCUCCUUACGAGGAGACCUGCCUCA | 1716 |
| | GCUUCCCUG | |
| R3013_CasPhi12_S | AUUGCUCCUUACGAGGAGACCAGGCCCA | 1717 |
| | GCCAGCACU | |
| R3014_CasPhi12_S | AUUGCUCCUUACGAGGAGACAGGCCCAG | 1718 |
| | CCAGCACUC | |
| R3015_CasPhi12_S | AUUGCUCCUUACGAGGAGACCACCCCAG | 1719 |
| | CCCCUCACA | |
| R3016_CasPhi12_S | AUUGCUCCUUACGAGGAGACGGACCGUA | 1720 |
| | GGAUGUCCC | |

TABLE AB
shortened CasΦ.12 gRNAs targeting human CIITA

| | | SEQ |
|---|---|---|
| | Repeat + spacer | ID |
| Name | RNA Sequence (5′→3′) | NO |
| R4503_CasPhi12_ | AUUGCUCCUUACGAGGAGACCUACACAA | 1721 |
| C2TA_T1.1_S | UGCGUUGCC | |
| R4504_CasPhi12_ | AUUGCUCCUUACGAGGAGACGGGCUCUG | 1722 |
| C2TA_T1.2_S | ACAGGUAGG | |
| R4505_CasPhi12_ | AUUGCUCCUUACGAGGAGACUGUAGGAA | 1723 |
| C2TA_T1.3_S | UCCCAGCCA | |
| R4506_CasPhi12_ | AUUGCUCCUUACGAGGAGACCCUGGCUC | 1724 |
| C2TA_T1.8_S | CACGCCCUG | |
| R4507_CasPhi12_ | AUUGCUCCUUACGAGGAGACGGGAAGCU | 1725 |
| C2TA_T1.9_S | GAGGGCACG | |
| R4508_CasPhi12_ | AUUGCUCCUUACGAGGAGACACAGCGAU | 1726 |
| C2TA_T2.1_S | GCUGACCCC | |
| R4509_CasPhi12_ | AUUGCUCCUUACGAGGAGACUUAACAGC | 1727 |
| C2TA_T2.2_S | GAUGCUGAC | |
| R4510_CasPhi12_ | AUUGCUCCUUACGAGGAGACUAUGACCA | 1728 |
| C2TA_T2.3_S | GAUGGACCU | |
| R4511_CasPhi12_ | AUUGCUCCUUACGAGGAGACGGGCCCCU | 1729 |
| C2TA_T2.4_S | AGAAGGUGG | |
| R4512_CasPhi12_ | AUUGCUCCUUACGAGGAGACUAGGGGCC | 1730 |
| C2TA_T2.5_S | CCAACUCCA | |
| R4513_CasPhi12_ | AUUGCUCCUUACGAGGAGACAGAAGCUC | 1731 |
| C2TA_T2.6_S | CAGGUAGCC | |
| R4514_CasPhi12_ | AUUGCUCCUUACGAGGAGACUCCAGCCA | 1732 |
| C2TA_T2.7_S | GGUCCAUCU | |
| R4515_CasPhi12_ | AUUGCUCCUUACGAGGAGACUUCUCCAG | 1733 |
| C2TA_T2.8_S | CCAGGUCCA | |
| R5200_CasPhi12_S | AUUGCUCCUUACGAGGAGACAGCAGGCU | 2290 |
| | GUUGUGUGA | |
| R5201_CasPhi12_S | AUUGCUCCUUACGAGGAGACCAUGUCAC | 2291 |
| | ACAACAGCC | |
| R5202_CasPhi12_S | AUUGCUCCUUACGAGGAGACUGUGACAU | 2292 |
| | GGAAGGUGA | |
| R5203_CasPhi12_S | AUUGCUCCUUACGAGGAGACAUCACCUU | 2293 |
| | CCAUGUCAC | |
| R5204_CasPhi12_S | AUUGCUCCUUACGAGGAGACGCAUAAGC | 2294 |
| | CUCCCUGGU | |
| R5205_CasPhi12_S | AUUGCUCCUUACGAGGAGACCAGGACUC | 2295 |
| | CCAGCUGGA | |
| R5206_CasPhi12_S | AUUGCUCCUUACGAGGAGACCUCAGGCC | 2296 |
| | CUCCAGCUG | |
| R5207_CasPhi12_S | AUUGCUCCUUACGAGGAGACUGCUGGCA | 2297 |
| | UCUCCAUAC | |
| R5208_CasPhi12_S | AUUGCUCCUUACGAGGAGACUGCCCAAC | 2298 |
| | UUCUGCUGG | |
| R5209_CasPhi12_S | AUUGCUCCUUACGAGGAGACCUGCCCAA | 2299 |
| | CUUCUGCUG | |
| R5210_CasPhi12_S | AUUGCUCCUUACGAGGAGACUCUGCCCA | 2300 |
| | ACUUCUGCU | |
| R5211_CasPhi12_S | AUUGCUCCUUACGAGGAGACUGACUUUU | 2301 |
| | CUGCCCAAC | |
| R5212_CasPhi12_S | AUUGCUCCUUACGAGGAGACCUGACUUU | 2302 |
| | UCUGCCCAA | |
| R5213_CasPhi12_S | AUUGCUCCUUACGAGGAGACUCUGACUU | 2303 |
| | UUCUGCCCA | |
| R5214_CasPhi12_S | AUUGCUCCUUACGAGGAGACCCAGAGGA | 2304 |
| | GCUUCCGGC | |
| R5215_CasPhi12_S | AUUGCUCCUUACGAGGAGACAGGUCUGC | 2305 |
| | CGGAAGCUC | |
| R5216_CasPhi12_S | AUUGCUCCUUACGAGGAGACCGGCAGAC | 2306 |
| | CUGAAGCAC | |
| R5217_CasPhi12_S | AUUGCUCCUUACGAGGAGACCAGUGCUU | 2307 |
| | CAGGUCUGC | |
| R5218_CasPhi12_S | AUUGCUCCUUACGAGGAGACAACAGCGC | 2308 |
| | AGGCAGUGG | |
| R5219_CasPhi12_S | AUUGCUCCUUACGAGGAGACAACCAGGA | 2309 |
| | GCCAGCCUC | |
| R5220_CasPhi12_S | AUUGCUCCUUACGAGGAGACUCCAGGCG | 2310 |
| | CAUCUGGCC | |
| R5221_CasPhi12_S | AUUGCUCCUUACGAGGAGACCUCCAGGC | 2311 |
| | GCAUCUGGC | |
| R5222_CasPhi12_S | AUUGCUCCUUACGAGGAGACUCUCCAGG | 2312 |
| | CGCAUCUGG | |
| R5223_CasPhi12_S | AUUGCUCCUUACGAGGAGACCUCCAGUU | 2313 |
| | CCUCGUUGA | |
| R5224_CasPhi12_S | AUUGCUCCUUACGAGGAGACUCCAGUUC | 2314 |
| | CUCGUUGAG | |
| R5225_CasPhi12_S | AUUGCUCCUUACGAGGAGACAGGCAGCU | 2315 |
| | CAACGAGGA | |
| R5226_CasPhi12_S | AUUGCUCCUUACGAGGAGACCUCGUUGA | 2316 |
| | GCUGCCUGA | |
| R5227_CasPhi12_S | AUUGCUCCUUACGAGGAGACAGCUGCCU | 2317 |
| | GAAUCUCCC | |
| R5228_CasPhi12_S | AUUGCUCCUUACGAGGAGACGUCCCCAC | 2318 |
| | CAUCUCCAC | |
| R5229_CasPhi12_S | AUUGCUCCUUACGAGGAGACUCCCCACC | 2319 |
| | AUCUCCACU | |
| R5230_CasPhi12_S | AUUGCUCCUUACGAGGAGACCCAGAGCC | 2320 |
| | CAUGGGGCA | |
| R5231_CasPhi12_S | AUUGCUCCUUACGAGGAGACGCCAGAGC | 2321 |
| | CCAUGGGGC | |
| R5232_CasPhi12_S | AUUGCUCCUUACGAGGAGACCAGCCUCA | 2322 |
| | GAGAUUUGC | |
| R5233_CasPhi12_S | AUUGCUCCUUACGAGGAGACGGAGGCCG | 2323 |
| | UGGACAGUG | |
| R5234_CasPhi12_S | AUUGCUCCUUACGAGGAGACACUGUCCA | 2324 |
| | CGGCCUCCC | |
| R5235_CasPhi12_S | AUUGCUCCUUACGAGGAGACGCUCCAUC | 2325 |
| | AGCCACUGA | |
| R5236_CasPhi12_S | AUUGCUCCUUACGAGGAGACAGGCAUGC | 2326 |
| | UGGGCAGGU | |
| R5237_CasPhi12_S | AUUGCUCCUUACGAGGAGACCUCGGGAG | 2327 |
| | GUCAGGGCA | |
| R5238_CasPhi12_S | AUUGCUCCUUACGAGGAGACGCUCGGGA | 2328 |
| | GGUCAGGGC | |
| R5239_CasPhi12_S | AUUGCUCCUUACGAGGAGACGAGACCUC | 2329 |
| | UCCAGCUGC | |
| R5240_CasPhi12_S | AUUGCUCCUUACGAGGAGACUUGGAGAC | 2330 |
| | CUCUCCAGC | |
| R5241_CasPhi12_S | AUUGCUCCUUACGAGGAGACGAAGCUUG | 2331 |
| | UUGGAGACC | |
| R5242_CasPhi12_S | AUUGCUCCUUACGAGGAGACGGAAGCUU | 2332 |
| | GUUGGAGAC | |
| R5243_CasPhi12_S | AUUGCUCCUUACGAGGAGACUGGAAGCU | 2333 |
| | UGUUGGAGA | |
| R5244_CasPhi12_S | AUUGCUCCUUACGAGGAGACUACCGCUC | 2334 |
| | ACUGCAGGA | |
| R5245_CasPhi12_S | AUUGCUCCUUACGAGGAGACCUGCUGCU | 2335 |
| | CCUCUCCAG | |
| R5246_CasPhi12_S | AUUGCUCCUUACGAGGAGACCCGCUCCA | 2336 |
| | GGCUCUUGC | |
| R5247_CasPhi12_S | AUUGCUCCUUACGAGGAGACUGCCCAGU | 2337 |
| | CCGGGGUGG | |
| R5248_CasPhi12_S | AUUGCUCCUUACGAGGAGACGGCCAGCU | 2338 |
| | GCCGUUCUG | |
| R5249_CasPhi12_S | AUUGCUCCUUACGAGGAGACGCAGCCAA | 2339 |
| | CAGCACCUC | |
| R5250_CasPhi12_S | AUUGCUCCUUACGAGGAGACGCUGCCAA | 2340 |
| | GGAGCACCG | |
| R5251_CasPhi12_S | AUUGCUCCUUACGAGGAGACCCCAGCAC | 2341 |
| | AGCAAUCAC | |
| R5252_CasPhi12_S | AUUGCUCCUUACGAGGAGACGCCCAGCA | 2342 |
| | CAGCAAUCA | |
| R5253_CasPhi12_S | AUUGCUCCUUACGAGGAGACCUGUGCUG | 2343 |
| | GGCAAAGCU | |
| R5254_CasPhi12_S | AUUGCUCCUUACGAGGAGACCCCUGACC | 2344 |
| | AGCUUUGCC | |
| R5255_CasPhi12_S | AUUGCUCCUUACGAGGAGACGGCUGGGG | 2345 |
| | CAGUGAGCC | |
| R5256_CasPhi12_S | AUUGCUCCUUACGAGGAGACUGGCCGGC | 2346 |
| | UUCCCCAGU | |
| R5257_CasPhi12_S | AUUGCUCCUUACGAGGAGACCCCAGUAC | 2347 |
| | GACUUUGUC | |
| R5258_CasPhi12_S | AUUGCUCCUUACGAGGAGACGUCUUCUC | 2348 |
| | UGUCCCCUG | |
| R5259_CasPhi12_S | AUUGCUCCUUACGAGGAGACUCUUCUCU | 2349 |
| | GUCCCCUGC | |
| R5260_CasPhi12_S | AUUGCUCCUUACGAGGAGACUCUGUCCC | 2350 |
| | CUGCCAUUG | |
| R5261_CasPhi12_S | AUUGCUCCUUACGAGGAGACAAGCAAUG | 2351 |
| | GCAGGGGAC | |
| R5262_CasPhi12_S | AUUGCUCCUUACGAGGAGACCUUGAACC | 2352 |
| | GUCCGGGGG | |
| R5263_CasPhi12_S | AUUGCUCCUUACGAGGAGACAACCGUCC | 2353 |
| | GGGGGAUGC | |
| R5264_CasPhi12_S | AUUGCUCCUUACGAGGAGACUCCCUGGG | 2354 |
| | CCCACAGCC | |
| R5265_CasPhi12_S | AUUGCUCCUUACGAGGAGACAAGAUGUG | 2355 |
| | GCUGAAAAC | |
| R5266_CasPhi12_S | AUUGCUCCUUACGAGGAGACUCAGCCAC | 2356 |
| | AUCUUGAAG | |
| R5267_CasPhi12_S | AUUGCUCCUUACGAGGAGACCAGCCACA | 2357 |
| | UCUUGAAGA | |
| R5268_CasPhi12_S | AUUGCUCCUUACGAGGAGACAGCCACAU | 2358 |
| | CUUGAAGAG | |
| R5269_CasPhi12_S | AUUGCUCCUUACGAGGAGACAAGAGACC | 2359 |
| | UGACCGCGU | |
| R5270_CasPhi12_S | AUUGCUCCUUACGAGGAGACUGCUCAUC | 2360 |
| | CUAGACGGC | |
| R5271_CasPhi12_S | AUUGCUCCUUACGAGGAGACCAGCUCCU | 2361 |
| | CGAAGCCGU | |
| R5272_CasPhi12_S | AUUGCUCCUUACGAGGAGACCGCUUCCA | 2362 |
| | GCUCCUCGA | |
| R5273_CasPhi12_S | AUUGCUCCUUACGAGGAGACGAGGAGCU | 2363 |
| | GGAAGCGCA | |
| R5274_CasPhi12_S | AUUGCUCCUUACGAGGAGACCUGCACAG | 2364 |
| | CACGUGCGG | |
| R5275_CasPhi12_S | AUUGCUCCUUACGAGGAGACUGGAAAAG | 2365 |
| | GCCGGCCAG | |
| R5276_CasPhi12_S | AUUGCUCCUUACGAGGAGACUUCUGGAA | 2366 |
| | AAGGCCGGC | |
| R5277_CasPhi12_S | AUUGCUCCUUACGAGGAGACUCCAGAAG | 2367 |
| | AAGCUGCUC | |
| R5278_CasPhi12_S | AUUGCUCCUUACGAGGAGACCCAGAAGA | 2368 |
| | AGCUGCUCC | |
| R5279_CasPhi12_S | AUUGCUCCUUACGAGGAGACCAGAAGAA | 2369 |
| | GCUGCUCCG | |
| R5280_CasPhi12_S | AUUGCUCCUUACGAGGAGACCACCCUCC | 2370 |
| | UCCUCACAG | |
| R5281_CasPhi12_S | AUUGCUCCUUACGAGGAGACCUCAGGCU | 2371 |
| | CUGGACCAG | |
| R5282_CasPhi12_S | AUUGCUCCUUACGAGGAGACGAGCUGUC | 2372 |
| | CGGCUUCUC | |
| R5283_CasPhi12_S | AUUGCUCCUUACGAGGAGACAGCUGUCC | 2373 |
| | GGCUUCUCC | |
| R5284_CasPhi12_S | AUUGCUCCUUACGAGGAGACUCCAUGGA | 2374 |
| | GCAGGCCCA | |
| R5285_CasPhi12_S | AUUGCUCCUUACGAGGAGACGAGAGCUC | 2375 |
| | AGGGAUGAC | |
| R5286_CasPhi12_S | AUUGCUCCUUACGAGGAGACAGAGCUCA | 2376 |
| | GGGAUGACA | |
| R5287_CasPhi12_S | AUUGCUCCUUACGAGGAGACGUGCUCUG | 2377 |
| | UCAUCCCUG | |
| R5288_CasPhi12_S | AUUGCUCCUUACGAGGAGACUUCUCAGU | 2378 |
| | CACAGCCAC | |
| R5289_CasPhi12_S | AUUGCUCCUUACGAGGAGACUCAGUCAC | 2379 |
| | AGCCACAGC | |
| R5290_CasPhi12_S | AUUGCUCCUUACGAGGAGACGUGCCGGG | 2380 |
| | CAGUGUGCC | |
| R5291_CasPhi12_S | AUUGCUCCUUACGAGGAGACUGCCGGGC | 2381 |
| | AGUGUGCCA | |
| R5292_CasPhi12_S | AUUGCUCCUUACGAGGAGACGCGUCCUC | 2382 |
| | CCCAAGCUC | |
| R5293_CasPhi12_S | AUUGCUCCUUACGAGGAGACGGGAGGAC | 2383 |
| | GCCAAGCUG | |
| R5294_CasPhi12_S | AUUGCUCCUUACGAGGAGACGCCAGCUC | 2384 |
| | UGCCAGGGC | |
| R5295_CasPhi12_S | AUUGCUCCUUACGAGGAGACAUGUCUGC | 2385 |
| | GGCCCAGCU | |
| R5392_CasPhi12_S | AUUGCUCCUUACGAGGAGACGAUGUCUG | 2386 |
| | CGGCCCAGC | |
| R5393_CasPhi12_S | AUUGCUCCUUACGAGGAGACCCAUCCGC | 2387 |
| | AGACGUGAG | |
| R5394_CasPhi12_S | AUUGCUCCUUACGAGGAGACGCCAUCGC | 2388 |
| | CCAGGUCCU | |
| R5395_CasPhi12_S | AUUGCUCCUUACGAGGAGACGGCCAUCG | 2389 |
| | CCCAGGUCC | |
| R5396_CasPhi12_S | AUUGCUCCUUACGAGGAGACGACUAAGC | 2390 |
| | CUUUGGCCA | |
| R5397_CasPhi12_S | AUUGCUCCUUACGAGGAGACGUCCAACA | 2391 |
| | CCCACCGCG | |
| R5398_CasPhi12_S | AUUGCUCCUUACGAGGAGACCAGGAGGA | 2392 |
| | AGCUGGGGA | |
| R5399_CasPhi12_S | AUUGCUCCUUACGAGGAGACCCCAGCUU | 2393 |
| | CCUCCUGCA | |
| R5400_CasPhi12_S | AUUGCUCCUUACGAGGAGACCUCCUGCA | 2394 |
| | AUGCUUCCU | |
| R5401_CasPhi12_S | AUUGCUCCUUACGAGGAGACCUGGGGGC | 2395 |
| | CCUGUGGCU | |
| R5402_CasPhi12_S | AUUGCUCCUUACGAGGAGACGCCACUCA | 2396 |
| | GAGCCAGCC | |
| R5403_CasPhi12_S | AUUGCUCCUUACGAGGAGACCGCCACUC | 2397 |
| | AGAGCCAGC | |
| R5404_CasPhi12_S | AUUGCUCCUUACGAGGAGACAUUUCGCC | 2398 |
| | ACUCAGAGC | |
| R5405_CasPhi12_S | AUUGCUCCUUACGAGGAGACUCCUUGAU | 2399 |
| | UUCGCCACU | |
| R5406_CasPhi12_S | AUUGCUCCUUACGAGGAGACGGGUCAAU | 2400 |
| | GCUAGGUAC | |
| R5407_CasPhi12_S | AUUGCUCCUUACGAGGAGACCUUGGGGU | 2401 |
| | CAAUGCUAG | |
| R5408_CasPhi12_S | AUUGCUCCUUACGAGGAGACUUCCUUGG | 2402 |
| | GGUCAAUGC | |
| R5409_CasPhi12_S | AUUGCUCCUUACGAGGAGACACCCCAAG | 2403 |
| | GAAGAAGAG | |
| R5410_CasPhi12_S | AUUGCUCCUUACGAGGAGACUCAUAGGG | 2404 |
| | CCUCUUCUU | |
| R5411_CasPhi12_S | AUUGCUCCUUACGAGGAGACCUGGCUGG | 2405 |
| | GCUGAUCUU | |
| R5412_CasPhi12_S | AUUGCUCCUUACGAGGAGACUGGCUGGG | 2406 |
| | CUGAUCUUC | |
| R5413_CasPhi12_S | AUUGCUCCUUACGAGGAGACCAGCCUCC | 2407 |
| | CGCCCGCUG | |
| R5414_CasPhi12_S | AUUGCUCCUUACGAGGAGACCUGUCCAC | 2408 |
| | CGAGGCAGC | |
| R5415_CasPhi12_S | AUUGCUCCUUACGAGGAGACUGCUUCCU | 2409 |
| | GUCCACCGA | |
| R5416_CasPhi12_S | AUUGCUCCUUACGAGGAGACAGGUACCU | 2410 |
| | CGCAAGCAC | |
| R5417_CasPhi12_S | AUUGCUCCUUACGAGGAGACCGAGGUAC | 2411 |
| | CUGAAGCGG | |
| R5418_CasPhi12_S | AUUGCUCCUUACGAGGAGACCAGCCUCC | 2412 |
| | UCGGCCUCG | |
| R5419_CasPhi12_S | AUUGCUCCUUACGAGGAGACGGCAGCAC | 2413 |
| | GUGGUACAG | |
| R5420_CasPhi12_S | AUUGCUCCUUACGAGGAGACGCAGCACG | 2414 |
| | UGGUACAGG | |
| R5421_CasPhi12_S | AUUGCUCCUUACGAGGAGACUCUGGGCA | 2415 |
| | CCCGCCUCA | |
| R5422_CasPhi12_S | AUUGCUCCUUACGAGGAGACCUGGGCAC | 2416 |
| | CCGCCUCAC | |
| R5423_CasPhi12_S | AUUGCUCCUUACGAGGAGACUGGGCACC | 2417 |
| | CGCCUCACG | |
| R5424_CasPhi12_S | AUUGCUCCUUACGAGGAGACCCCAGUAC | 2418 |
| | AUGUGCAUC | |
| R5425_CasPhi12_S | AUUGCUCCUUACGAGGAGACGCCCGCCG | 2419 |
| | CCUCCAAGG | |
| R5426_CasPhi12_S | AUUGCUCCUUACGAGGAGACGAGGCGGC | 2420 |
| | GGGCCAAGA | |
| R5427_CasPhi12_S | AUUGCUCCUUACGAGGAGACUCCCUGGA | 2421 |
| | CCUCCGCAG | |
| R5428_CasPhi12_S | AUUGCUCCUUACGAGGAGACGCCCCUCU | 2422 |
| | GGAUUGGGG | |
| R5429_CasPhi12_S | AUUGCUCCUUACGAGGAGACCCCCUCUG | 2423 |
| | GAUUGGGGA | |
| R5430_CasPhi12_S | AUUGCUCCUUACGAGGAGACGGGAGCCU | 2424 |
| | CGUGGGACU | |
| R5431_CasPhi12_S | AUUGCUCCUUACGAGGAGACGUCUCCCC | 2425 |
| | AUGCUGCUG | |
| R5432_CasPhi12_S | AUUGCUCCUUACGAGGAGACUCCUCUGC | 2426 |
| | UGCCUGAAG | |
| R5433_CasPhi12_S | AUUGCUCCUUACGAGGAGACAGGCAGCA | 2427 |
| | GAGGAGAAG | |
| R5434_CasPhi12_S | AUUGCUCCUUACGAGGAGACAAAGGCUC | 2428 |
| | GAUGGUGAA | |
| R5435_CasPhi12_S | AUUGCUCCUUACGAGGAGACGAAAGGCU | 2429 |
| | CGAUGGUGA | |
| R5436_CasPhi12_S | AUUGCUCCUUACGAGGAGACACCAUCGA | 2430 |
| | GCCUUUCAA | |
| R5437_CasPhi12_S | AUUGCUCCUUACGAGGAGACGCUUUGAA | 2431 |
| | AGGCUCGAU | |
| R5438_CasPhi12_S | AUUGCUCCUUACGAGGAGACAGGGACUU | 2432 |
| | GGCUUUGAA | |
| R5439_CasPhi12_S | AUUGCUCCUUACGAGGAGACCAAAGCCA | 2433 |
| | AGUCCCUGA | |
| R5440_CasPhi12_S | AUUGCUCCUUACGAGGAGACAAAGCCAA | 2434 |
| | GUCCCUGAA | |
| R5441_CasPhi12_S | AUUGCUCCUUACGAGGAGACCACAUCCU | 2435 |
| | UCAGGGACU | |
| R5442_CasPhi12_S | AUUGCUCCUUACGAGGAGACCCAGGUCU | 2436 |
| | UCCACAUCC | |
| R5443_CasPhi12_S | AUUGCUCCUUACGAGGAGACCCCAGGUC | 2437 |
| | UUCCACAUC | |
| R5444_CasPhi12_S | AUUGCUCCUUACGAGGAGACCUCGGAAG | 2438 |
| | ACACAGCUG | |
| R5445_CasPhi12_S | AUUGCUCCUUACGAGGAGACGGUCCCGA | 2439 |
| | ACAGCAGGG | |
| R5446_CasPhi12_S | AUUGCUCCUUACGAGGAGACAGGUCCCG | 2440 |
| | AACAGCAGG | |
| R5447_CasPhi12_S | AUUGCUCCUUACGAGGAGACUUUAGGUC | 2441 |
| | CCGAACAGC | |
| R5448_CasPhi12_S | AUUGCUCCUUACGAGGAGACCUUUAGGU | 2442 |
| | CCCGAACAG | |
| R5449_CasPhi12_S | AUUGCUCCUUACGAGGAGACGGGACCUA | 2443 |
| | AAGAAACUG | |
| R5450_CasPhi12_S | AUUGCUCCUUACGAGGAGACGGGAAAGC | 2444 |
| | CUGGGGGCC | |
| R5451_CasPhi12_S | AUUGCUCCUUACGAGGAGACGGGGAAAG | 2445 |
| | CCUGGGGGC | |
| R5452_CasPhi12_S | AUUGCUCCUUACGAGGAGACCCCCAAAC | 2446 |
| | UGGUGCGGA | |
| R5453_CasPhi12_S | AUUGCUCCUUACGAGGAGACCCCAAACU | 2447 |
| | GGUGCGGAU | |
| R5454_CasPhi12_S | AUUGCUCCUUACGAGGAGACUUCUCACU | 2448 |
| | CAGCGCAUC | |
| R5455_CasPhi12_S | AUUGCUCCUUACGAGGAGACAGCUGGGG | 2449 |
| | GAAGGUGGC | |
| R5456_CasPhi12_S | AUUGCUCCUUACGAGGAGACCCCCAGCU | 2450 |
| | GAAGUCCUU | |
| R5457_CasPhi12_S | AUUGCUCCUUACGAGGAGACCAAGGACU | 2451 |
| | UCAGCUGGG | |
| R5458_CasPhi12_S | AUUGCUCCUUACGAGGAGACCCAAGGAC | 2452 |
| | UUCAGCUGG | |
| R5459_CasPhi12_S | AUUGCUCCUUACGAGGAGACAGGGUUUC | 2453 |
| | CAAGGACUU | |
| R5460_CasPhi12_S | AUUGCUCCUUACGAGGAGACUAGGCACC | 2454 |
| | CAGGUCAGU | |
| R5461_CasPhi12_S | AUUGCUCCUUACGAGGAGACGUAGGCAC | 2455 |
| | CCAGGUCAG | |
| R5462_CasPhi12_S | AUUGCUCCUUACGAGGAGACGCUCGCUG | 2456 |
| | CAUCCCUGC | |
| R5463_CasPhi12_S | AUUGCUCCUUACGAGGAGACGCCUGAGC | 2457 |
| | AGGGAUGCA | |
| R5464_CasPhi12_S | AUUGCUCCUUACGAGGAGACUACAAUAA | 2458 |
| | CUGCAUCUG | |
| R5465_CasPhi12_S | AUUGCUCCUUACGAGGAGACGCUCGUGU | 2459 |
| | GCUUCCGGA | |
| R5466_CasPhi12_S | AUUGCUCCUUACGAGGAGACCGGACAUG | 2460 |
| | GUGUCCCUC | |
| R5467_CasPhi12_S | AUUGCUCCUUACGAGGAGACACGGCUGC | 2461 |
| | CGGGGCCCA | |
| R5468_CasPhi12_S | AUUGCUCCUUACGAGGAGACGGAGGUGU | 2462 |
| | CCUCAUGUG | |
| R5469_CasPhi12_S | AUUGCUCCUUACGAGGAGACCUGGACAC | 2463 |
| | UGAAUGGGA | |
| R5470_CasPhi12_S | AUUGCUCCUUACGAGGAGACAGUGUCCA | 2464 |
| | GGAACACCU | |
| R5471_CasPhi12_S | AUUGCUCCUUACGAGGAGACCAGGUGUU | 2465 |
| | CCUGGACAC | |
| R5472_CasPhi12_S | AUUGCUCCUUACGAGGAGACUUGCAGGU | 2466 |
| | GUUCCUGGA | |
| R5473_CasPhi12_S | AUUGCUCCUUACGAGGAGACACGGAUCA | 2467 |
| | GCCUGAGAU | |

TABLE AC
CasΦ.12 gRNAs targeting mouse PCSK9

| | Repeat + spacer | SEQ |
|---|---|---|
| Name | RNA Sequence (5′→3′) | ID NO |
| R4238_CasPhi12_S | AUUGCUCCUUACGAGGAGACCCGCUGUUGCCG | 1734 |
| | CCGCU | |
| R4239_CasPhi12_S | AUUGCUCCUUACGAGGAGACCCGCCGCUGCUG | 1735 |
| | CUGCU | |
| R4240_CasPhi12_S | AUUGCUCCUUACGAGGAGACCUGCUACUGUGC | 1736 |
| | CCCAC | |
| R4241_CasPhi12_S | AUUGCUCCUUACGAGGAGACAUAAUCUCCAUC | 1737 |
| | CUCGU | |
| R4242_CasPhi12_S | AUUGCUCCUUACGAGGAGACUGAAGAGCUGAU | 1738 |
| | GCUCG | |
| R4243_CasPhi12_S | AUUGCUCCUUACGAGGAGACGAGCAACGGCGG | 1739 |
| | AAGGU | |
| R4244_CasPhi12_S | AUUGCUCCUUACGAGGAGACCUGGCAGCCUCC | 1740 |
| | AGGCC | |
| R4245_CasPhi12_S | AUUGCUCCUUACGAGGAGACUGGUGCUGAUGG | 1741 |
| | AGGAG | |
| R4246_CasPhi12_S | AUUGCUCCUUACGAGGAGACAAUCUGUAGCCU | 1742 |
| | CUGGG | |
| R4247_CasPhi12_S | AUUGCUCCUUACGAGGAGACUUCAAUCUGUAG | 1743 |
| | CCUCU | |
| R4248_CasPhi12_S | AUUGCUCCUUACGAGGAGACGUUCAAUCUGUA | 1744 |
| | GCCUC | |
| R4249_CasPhi12_S | AUUGCUCCUUACGAGGAGACAACAAACUGCCC | 1745 |
| | ACCGC | |
| R4250_CasPhi12_S | AUUGCUCCUUACGAGGAGACAUGACAUAGCCC | 1746 |
| | CGGCG | |
| R4251_CasPhi12_S | AUUGCUCCUUACGAGGAGACUACAUAUCUUUU | 1747 |
| | AUGAC | |
| R4252_CasPhi12_S | AUUGCUCCUUACGAGGAGACUAUGACCUCUUC | 1748 |
| | CCUGG | |
| R4253_CasPhi12_S | AUUGCUCCUUACGAGGAGACAUGACCUCUUCC | 1749 |
| | CUGGC | |
| R4254_CasPhi12_S | AUUGCUCCUUACGAGGAGACUGACCUCUUCCC | 1750 |
| | UGGCU | |
| R4255_CasPhi12_S | AUUGCUCCUUACGAGGAGACACCAAGAAGCCA | 1751 |
| | GGGAA | |
| R4256_CasPhi12_S | AUUGCUCCUUACGAGGAGACCCUGGCUUCUUG | 1752 |
| | GUGAA | |
| R4257_CasPhi12_S | AUUGCUCCUUACGAGGAGACUUGGUGAAGAUG | 1753 |
| | AGCAG | |
| R4258_CasPhi12_S | AUUGCUCCUUACGAGGAGACGUGAAGAUGAGC | 1754 |
| | AGUGA | |
| R4259_CasPhi12_S | AUUGCUCCUUACGAGGAGACCCCCAUGUGGAG | 1755 |
| | UACAU | |
| R4260_CasPhi12_S | AUUGCUCCUUACGAGGAGACCUCAAUGUACUC | 1756 |
| | CACAU | |
| R4261_CasPhi12_S | AUUGCUCCUUACGAGGAGACAGGAAGACUCCU | 1757 |
| | UUGUC | |
| R4262_CasPhi12_S | AUUGCUCCUUACGAGGAGACGUCUUCGCCCAG | 1758 |
| | AGCAU | |
| R4263_CasPhi12_S | AUUGCUCCUUACGAGGAGACUCUUCGCCCAGA | 1759 |
| | GCAUC | |
| R4264_CasPhi12_S | AUUGCUCCUUACGAGGAGACGCCCAGAGCAUC | 1760 |
| | CCAUG | |
| R4265_CasPhi12_S | AUUGCUCCUUACGAGGAGACCAUGGGAUGCUC | 1761 |
| | UGGGC | |
| R4266_CasPhi12_S | AUUGCUCCUUACGAGGAGACGCUCCAGGUUCC | 1762 |
| | AUGGG | |
| R4267_CasPhi12_S | AUUGCUCCUUACGAGGAGACUCCCAGCAUGGC | 1763 |
| | ACCAG | |
| R4268_CasPhi12_S | AUUGCUCCUUACGAGGAGACCUCUGUCUGGUG | 1764 |
| | CCAUG | |
| R4269_CasPhi12_S | AUUGCUCCUUACGAGGAGACGAUACCAGCAUC | 1765 |
| | CAGGG | |
| R4270_CasPhi12_S | AUUGCUCCUUACGAGGAGACAGGGCAGGGUCA | 1766 |
| | CCAUC | |
| R4271_CasPhi12_S | AUUGCUCCUUACGAGGAGACAAGUCGGUGAUG | 1767 |
| | GUGAC | |
| R4272_CasPhi12_S | AUUGCUCCUUACGAGGAGACAACAGCGUGCCG | 1768 |
| | GAGGA | |
| R4273_CasPhi12_S | AUUGCUCCUUACGAGGAGACGCCACACCAGCA | 1769 |
| | UCCCG | |
| R4274_CasPhi12_S | AUUGCUCCUUACGAGGAGACAGCACACGCAGG | 1770 |
| | CUGUG | |
| R4275_CasPhi12_S | AUUGCUCCUUACGAGGAGACACAGUUGAGCAC | 1771 |
| | ACGCA | |
| R4276_CasPhi12_S | AUUGCUCCUUACGAGGAGACCCUUGACAGUUG | 1772 |
| | AGCAC | |
| R4277_CasPhi12_S | AUUGCUCCUUACGAGGAGACGCUGACUCUUCC | 1773 |
| | GAAUA | |
| R4278_CasPhi12_S | AUUGCUCCUUACGAGGAGACAUUCGGAAGAGU | 1774 |
| | CAGCU | |
| R4279_CasPhi12_S | AUUGCUCCUUACGAGGAGACUUCGGAAGAGUC | 1775 |
| | AGCUA | |
| R4280_CasPhi12_S | AUUGCUCCUUACGAGGAGACGGAAGAGUCAGC | 1776 |
| | UAAUC | |
| R4281_CasPhi12_S | AUUGCUCCUUACGAGGAGACUGCUGCCCCUGG | 1777 |
| | CCGGU | |
| R4282_CasPhi12_S | AUUGCUCCUUACGAGGAGACAGGAUGCGGCUA | 1778 |
| | UACCC | |
| R4283_CasPhi12_S | AUUGCUCCUUACGAGGAGACCCAGCUGCUGCA | 1779 |
| | ACCAG | |
| R4284_CasPhi12_S | AUUGCUCCUUACGAGGAGACCAGCAGCUGGGA | 1780 |
| | ACUUC | |
| R4285_CasPhi12_S | AUUGCUCCUUACGAGGAGACCGGGACGACGCC | 1781 |
| | UGCCU | |
| R4286_CasPhi12_S | AUUGCUCCUUACGAGGAGACGUGGCCCCGACU | 1782 |
| | GUGAU | |
| R4287_CasPhi12_S | AUUGCUCCUUACGAGGAGACCCUUGGGGACUU | 1783 |
| | UGGGG | |
| R4288_CasPhi12_S | AUUGCUCCUUACGAGGAGACGUCCCCAAAGUC | 1784 |
| | CCCAA | |
| R4289_CasPhi12_S | AUUGCUCCUUACGAGGAGACGGGACUUUGGGG | 1785 |
| | ACUAA | |
| R4290_CasPhi12_S | AUUGCUCCUUACGAGGAGACGGGGACUAAUUU | 1786 |
| | UGGAC | |
| R4291_CasPhi12_S | AUUGCUCCUUACGAGGAGACGGGACUAAUUUU | 1787 |
| | GGACG | |
| R4292_CasPhi12_S | AUUGCUCCUUACGAGGAGACUGGACGCUGUGU | 1788 |
| | GGAUC | |
| R4293_CasPhi12_S | AUUGCUCCUUACGAGGAGACGGACGCUGUGUG | 1789 |
| | GAUCU | |
| R4294_CasPhi12_S | AUUGCUCCUUACGAGGAGACGACGCUGUGUGG | 1790 |
| | AUCUC | |
| R4295_CasPhi12_S | AUUGCUCCUUACGAGGAGACCCGGGGGCAAAG | 1791 |
| | AGAUC | |
| R4296_CasPhi12_S | AUUGCUCCUUACGAGGAGACGCCCCCGGGAAG | 1792 |
| | GACAU | |
| R4297_CasPhi12_S | AUUGCUCCUUACGAGGAGACCCCCCGGGAAGG | 1793 |
| | ACAUC | |
| R4298_CasPhi12_S | AUUGCUCCUUACGAGGAGACAUGUCACAGAGU | 1794 |
| | GGGAC | |
| R4299_CasPhi12_S | AUUGCUCCUUACGAGGAGACUGGCUCGGAUGC | 1795 |
| | UGAGC | |
| R4300_CasPhi12_S | AUUGCUCCUUACGAGGAGACCCCUGGCCGAGC | 1796 |
| | UGCGG | |
| R4301_CasPhi12_S | AUUGCUCCUUACGAGGAGACGUAGAGAAGUGG | 1797 |
| | AUCAG | |
| R4302_CasPhi12_S | AUUGCUCCUUACGAGGAGACGGUAGAGAAGUG | 1798 |
| | GAUCA | |
| R4303_CasPhi12_S | AUUGCUCCUUACGAGGAGACUCUACCAAAGAC | 1799 |
| | GUCAU | |
| R4304_CasPhi12_S | AUUGCUCCUUACGAGGAGACAUGACGUCUUUG | 1800 |
| | GUAGA | |
| R4305_CasPhi12_S | AUUGCUCCUUACGAGGAGACCCUGAGGACCAG | 1801 |
| | CAGGU | |
| R4306_CasPhi12_S | AUUGCUCCUUACGAGGAGACGGGGUCAGCACC | 1802 |
| | UGCUG | |
| R4307_CasPhi12_S | AUUGCUCCUUACGAGGAGACGAGUGGGCCCCG | 1803 |
| | AGUGU | |
| R4308_CasPhi12_S | AUUGCUCCUUACGAGGAGACUGGGGCACAGCG | 1804 |
| | GGCUG | |
| R4309_CasPhi12_S | AUUGCUCCUUACGAGGAGACUCCAGGAGCGGG | 1805 |
| | AGGCG | |
| R4310_CasPhi12_S | AUUGCUCCUUACGAGGAGACCAGACCUGCUGG | 1806 |
| | CCUCC | |
| R4311_CasPhi12_S | AUUGCUCCUUACGAGGAGACAGGGCCUUGCAG | 1807 |
| | ACCUG | |
| R4312_CasPhi12_S | AUUGCUCCUUACGAGGAGACGGGGGUGAGGGU | 1808 |
| | GUCUA | |
| R4313_CasPhi12_S | AUUGCUCCUUACGAGGAGACGGGGUGAGGGUG | 1809 |
| | UCUAU | |
| R4314_CasPhi12_S | AUUGCUCCUUACGAGGAGACGCACGGGGAACC | 1810 |
| | AGGCA | |
| R4315_CasPhi12_S | AUUGCUCCUUACGAGGAGACCCCGUGCCAACU | 1811 |
| | GCAGC | |
| R4316_CasPhi12_S | AUUGCUCCUUACGAGGAGACUGGAUGCUGCAG | 1812 |
| | UUGGC | |
| R4317_CasPhi12_S | AUUGCUCCUUACGAGGAGACUGGUGGCAGUGG | 1813 |
| | ACAUG | |
| R4318_CasPhi12_S | AUUGCUCCUUACGAGGAGACCACUUCCCAAUG | 1814 |
| | GAAGC | |
| R4319_CasPhi12_S | AUUGCUCCUUACGAGGAGACCAUUGGGAAGUG | 1815 |
| | GAAGA | |
| R4320_CasPhi12_S | AUUGCUCCUUACGAGGAGACGGAAGUGGAAGA | 1816 |
| | CCUUA | |
| R4321_CasPhi12_S | AUUGCUCCUUACGAGGAGACGUGUCCGGAGGC | 1817 |
| | AGCCU | |
| R4322_CasPhi12_S | AUUGCUCCUUACGAGGAGACGCCACCAGGCGG | 1818 |
| | CCAGU | |
| R4323_CasPhi12_S | AUUGCUCCUUACGAGGAGACCUGCUGCCAUGC | 1819 |
| | CCCAG | |
| R4324_CasPhi12_S | AUUGCUCCUUACGAGGAGACCAGCCCUGGGGC | 1820 |
| | AUGGC | |
| R4325_CasPhi12_S | AUUGCUCCUUACGAGGAGACCAUUCCAGCCCU | 1821 |
| | GGGGC | |
| R4326_CasPhi12_S | AUUGCUCCUUACGAGGAGACGCAUUCCAGCCC | 1822 |
| | UGGGG | |
| R4327_CasPhi12_S | AUUGCUCCUUACGAGGAGACUGCAUUCCAGCC | 1823 |
| | CUGGG | |
| R4328_CasPhi12_S | AUUGCUCCUUACGAGGAGACAUUUUGCAUUCC | 1824 |
| | AGCCC | |
| R4329_CasPhi12_S | AUUGCUCCUUACGAGGAGACCAUCCAGUCAGG | 1825 |
| | GUCCA | |
| R4330_CasPhi12_S | AUUGCUCCUUACGAGGAGACUCCACGCUGUAG | 1826 |
| | GCUCC | |
| R4331_CasPhi12_S | AUUGCUCCUUACGAGGAGACCCACACACAGGU | 1827 |
| | UGUCC | |
| R4332_CasPhi12_S | AUUGCUCCUUACGAGGAGACUCCACUGGUCCU | 1828 |
| | GUCUG | |
| R4333_CasPhi12_S | AUUGCUCCUUACGAGGAGACCUGAAGGCCGGC | 1829 |
| | UCCGG | |

TABLE AD
CasΦ.12 gRNAs targeting Bak1 in CHO cells

| | Repeat + spacer | SEQ |
|---|---|---|
| | RNA Sequence (5′→3′), | ID |
| Name | shown as DNA | NO |
| R2452 | ATTGCTCCTTACGAGGAGACG | 1830 |
| Bak1_CasPhi12_1_S | AAGCTATGTTTTCCAT | |
| R2453 | ATTGCTCCTTACGAGGAGACG | 1831 |
| Bak1_CasPhi12_2_S | CAGGGGCAGCCGCCCC | |
| R2454 | ATTGCTCCTTACGAGGAGACC | 1832 |
| Bak1_CasPhi12_3_S | TCCTAGAACCCAACAG | |
| R2455 | ATTGCTCCTTACGAGGAGACG | 1833 |
| Bak1_CasPhi12_4_S | AAAGACCTCCTCTGTG | |
| R2456 | ATTGCTCCTTACGAGGAGACT | 1834 |
| Bak1_CasPhi12_5_S | CCATCTCGGGGTTGGC | |
| R2457 | ATTGCTCCTTACGAGGAGACT | 1835 |
| Bak1_CasPhi12_6_S | TCCTGATGGTGGAGAT | |
| R2849_Bak1_CasPhi12_ | ATTGCTCCTTACGAGGAGACC | 1836 |
| nsd_sg1_S | TGACTCCCAGCTCTGA | |
| R2850_Bak1_CasPhi12_ | ATTGCTCCTTACGAGGAGACT | 1837 |
| nsd_sg2_S | GGGGTCAGAGCTGGGA | |
| R2851_Bak1_CasPhi12_ | ATTGCTCCTTACGAGGAGACG | 1838 |
| nsd_sg3_S | AAAGACCTCCTCTGTG | |
| R2852_Bak1_ | ATTGCTCCTTACGAGGAGACC | 1839 |
| CasPhi12_nsd_sg4_S | GAAGCTATGTTTTCCA | |
| R2853_Bak1_ | ATTGCTCCTTACGAGGAGACG | 1840 |
| CasPhi12_nsd_sg5_S | AAGCTATGTTTTCCAT | |
| R2854_Bak1_ | ATTGCTCCTTACGAGGAGACT | 1841 |
| CasPhi12_nsd_sg6_S | CCATCTCCACCATCAG | |
| R2855_Bak1_ | ATTGCTCCTTACGAGGAGACC | 1842 |
| CasPhi12_nsd_sg7_S | CATCTCCACCATCAGG | |
| R2856_Bak1_ | ATTGCTCCTTACGAGGAGACC | 1843 |
| CasPhi12_nsd_sg8_S | TGATGGTGGAGATGGA | |
| R2857_Bak1_ | ATTGCTCCTTACGAGGAGACC | 1844 |
| CasPhi12_nsd_sg9_S | ATCTCCACCATCAGGA | |
| R2858_Bak1_ | ATTGCTCCTTACGAGGAGACT | 1845 |
| CasPhi12_nsd_sg10_S | TCCTGATGGTGGAGAT | |
| R2859_Bak1_ | ATTGCTCCTTACGAGGAGACG | 1846 |
| CasPhi12_nsd_sg11_S | CAGGGGCAGCCGCCCC | |
| R2860_Bak1_ | ATTGCTCCTTACGAGGAGACT | 1847 |
| CasPhi12_nsd_sg12_S | CCATCTCGGGGTTGGC | |
| R2861_Bak1_ | ATTGCTCCTTACGAGGAGACT | 1848 |
| CasPhi12_nsd_sg13_S | AGGAGCAAATTGTCCA | |
| R2862_Bak1_ | ATTGCTCCTTACGAGGAGACG | 1849 |
| CasPhi12_nsd_sg14_S | GTTCTAGGAGCAAATT | |
| R2863_Bak1_ | ATTGCTCCTTACGAGGAGACG | 1850 |
| CasPhi12_nsd_sg15_S | CTCCTAGAACCCAACA | |
| R2864_Bak1_ | ATTGCTCCTTACGAGGAGACC | 1851 |
| CasPhi12_nsd_sg16_S | TCCTAGAACCCAACAG | |
| R3977_Bak1_CasPhi12_ | ATTGCTCCTTACGAGGAGACT | 1852 |
| exon1_sg1_S | CCAGACGCCATCTTTC | |
| R3978_Bak1_CasPhi12_ | ATTGCTCCTTACGAGGAGACT | 1853 |
| exon1_sg2_S | GGTAAGAGTCCTCCTG | |
| R3979_Bak1_CasPhi12_ | ATTGCTCCTTACGAGGAGACT | 1854 |
| exon3_sg1_S | TACAGCATCTTGGGTC | |
| R3980_Bak1_CasPhi12_ | ATTGCTCCTTACGAGGAGACG | 1855 |
| exon3_sg2_S | GTCAGGTGGGCCGGCA | |
| R3981_Bak1_CasPhi12_ | ATTGCTCCTTACGAGGAGACC | 1856 |
| exon3_sg3_S | TATCATTGGAGATGAC | |
| R3982_Bak1_CasPhi12_ | ATTGCTCCTTACGAGGAGACG | 1857 |
| exon3_sg4_S | AGATGACATTAACCGG | |
| R3983_Bak1_CasPhi12_ | ATTGCTCCTTACGAGGAGACT | 1858 |
| exon3_sg5_S | GGAACTCTGTGTCGTA | |
| R3984_Bak1_CasPhi12_ | ATTGCTCCTTACGAGGAGACC | 1859 |
| exon3_sg6_S | AGAATTTACTGGAGCA | |
| R3985_Bak1_CasPhi12_ | ATTGCTCCTTACGAGGAGACA | 1860 |
| exon3_sg7_S | CTGGAGCAGCTGCAGC | |
| R3986_Bak1_CasPhi12_ | ATTGCTCCTTACGAGGAGACC | 1861 |
| exon3_sg8_S | CAGCTGTGGGCTGCAG | |
| R3987_Bak1_CasPhi12_ | ATTGCTCCTTACGAGGAGACG | 1862 |
| exon3_sg9_S | TAGGCATTCCCAGCTG | |
| R3988_Bak1_CasPhi12_ | ATTGCTCCTTACGAGGAGACG | 1863 |
| exon3_sg10_S | TGAAGAGTTCGTAGGC | |
| R3989_Bak1_CasPhi12_ | ATTGCTCCTTACGAGGAGACA | 1864 |
| exon3_sg11_S | CCAAGATTGCCTCCAG | |
| R3990_Bak1_CasPhi12_ | ATTGCTCCTTACGAGGAGACC | 1865 |
| exon3_sg12_S | CTCCAGGTACCCACCA | |

TABLE AE
CasΦ.12 gRNAs targeting Bax in CHO cells

| | Repeat + spacer | SEQ |
|---|---|---|
| | RNA Sequence (5′→3′), | ID |
| Name | shown as DNA) | NO |
| R2458 | ATTGCTCCTTACGAGGAGACC | 1866 |
| Bax_CasPhi12_1_S | TAATGTGGATACTAAC | |
| R2459 | ATTGCTCCTTACGAGGAGACT | 1867 |
| Bax_CasPhi12_2_S | TCCGTGTGGCAGCTGA | |
| R2460 | ATTGCTCCTTACGAGGAGACC | 1868 |
| Bax_CasPhi12_3_S | TGATGGCAACTTCAAC | |
| R2461 | ATTGCTCCTTACGAGGAGACT | 1869 |
| Bax_CasPhi12_4_S | ACTTTGCTAGCAAACT | |
| R2462 | ATTGCTCCTTACGAGGAGACA | 1870 |
| Bax_CasPhi12_5_S | GCACCAGTTTGCTAGC | |
| R2463 | ATTGCTCCTTACGAGGAGACA | 1871 |
| Bax_CasPhi12_6_S | ACTGGGGCCGGGTTGT | |
| R2865_Bax_CasPhi12_ | ATTGCTCCTTACGAGGAGACT | 1872 |
| nsd_sg1_S | TCTCTTTCCTGTAGGA | |
| R2866_Bax_CasPhi12_ | ATTGCTCCTTACGAGGAGACT | 1873 |
| nsd_sg2_S | CTTTCCTGTAGGATGA | |
| R2867_Bax_ | ATTGCTCCTTACGAGGAGACC | 1874 |
| CasPhi12_nsd_sg3_S | CTGTAGGATGATTGCT | |
| R2868_Bax_ | ATTGCTCCTTACGAGGAGACC | 1875 |
| CasPhi12_nsd_sg4_S | TGTAGGATGATTGCTA | |
| R2869_Bax_ | ATTGCTCCTTACGAGGAGACC | 1876 |
| CasPhi12_nsd_sg5_S | TAATGTGGATACTAAC | |
| R2870_Bax_ | ATTGCTCCTTACGAGGAGACT | 1877 |
| CasPhi12_nsd_sg6_S | TCCGTGTGGCAGCTGA | |
| R2871_Bax_ | ATTGCTCCTTACGAGGAGACC | 1878 |
| CasPhi12_nsd_sg7_S | GTGTGGCAGCTGACAT | |
| R2872_Bax_ | ATTGCTCCTTACGAGGAGACC | 1879 |
| CasPhi12_nsd_sg8_S | CATCAGCAAACATGTC | |
| R2873_Bax_ | ATTGCTCCTTACGAGGAGACA | 1880 |
| CasPhi12_nsd_sg9_S | AGTTGCCATCAGCAAA | |
| R2874_Bax_ | ATTGCTCCTTACGAGGAGACG | 1881 |
| CasPhi12_nsd_sg10_S | CTGATGGCAACTTCAA | |
| R2875_Bax_ | ATTGCTCCTTACGAGGAGACC | 1882 |
| CasPhi12_nsd_sg11_S | TGATGGCAACTTCAAC | |
| R2876_Bax_ | ATTGCTCCTTACGAGGAGACA | 1883 |
| CasPhi12_nsd_sg12_S | ACTGGGGCCGGGTTGT | |
| R2877_Bax_ | ATTGCTCCTTACGAGGAGACT | 1884 |
| CasPhi12_nsd_sg13_S | TGCCCTTTTCTACTTT | |
| R2878_Bax_ | ATTGCTCCTTACGAGGAGACC | 1885 |
| CasPhi12_nsd_sg14_S | CCTTTTCTACTTTGCT | |
| R2879_Bax_ | ATTGCTCCTTACGAGGAGACC | 1886 |
| CasPhi12_nsd_sg15_S | TAGCAAAGTAGAAAAG | |
| R2880_Bax_ | ATTGCTCCTTACGAGGAGACG | 1887 |
| CasPhi12_nsd_sg16_S | CTAGCAAAGTAGAAAA | |
| R2881_Bax_ | ATTGCTCCTTACGAGGAGACT | 1888 |
| CasPhi12_nsd_sg17_S | CTACTTTGCTAGCAAA | |
| R2882_Bax_ | ATTGCTCCTTACGAGGAGACC | 1889 |
| CasPhi12_nsd_sg18_S | TACTTTGCTAGCAAAC | |
| R2883_Bax_ | ATTGCTCCTTACGAGGAGACT | 1890 |
| CasPhi12_nsd_sg19_S | ACTTTGCTAGCAAACT | |
| R2884_Bax_ | ATTGCTCCTTACGAGGAGACG | 1891 |
| CasPhi12_nsd_sg20_S | CTAGCAAACTGGTGCT | |
| R2885_Bax_ | ATTGCTCCTTACGAGGAGACC | 1892 |
| CasPhi12_nsd_sg21_S | TAGCAAACTGGTGCTC | |
| R2886_Bax_ | ATTGCTCCTTACGAGGAGACA | 1893 |
| CasPhi12_nsd_sg22_S | GCACCAGTTTGCTAGC | |

TABLE AF
CasΦ.12 gRNAs targeting Fut8 in CHO cells

| | Repeat + spacer | SEQ |
|---|---|---|
| | RNA Sequence (5′→3′), | ID |
| Name | shown as DNA) | NO |
| R2464 | ATTGCTCCTTACGAGGAGACC | 1894 |
| Fut8_CasPhi12_1_S | CACTTTGTCAGTGCGT | |
| R2465 | ATTGCTCCTTACGAGGAGACC | 1895 |
| Fut8_CasPhi12_2_S | TCAATGGGATGGAAGG | |
| R2466 | ATTGCTCCTTACGAGGAGACA | 1896 |
| Fut8_CasPhi12_3_S | GGAATACATGGTACAC | |
| R2467 | ATTGCTCCTTACGAGGAGACA | 1897 |
| Fut8_CasPhi12_4_S | AGAACATTTTCAGCTT | |
| R2468 | ATTGCTCCTTACGAGGAGACA | 1898 |
| Fut8_CasPhi12_5_S | TCCACTTTCATTCTGC | |
| R2469 | ATTGCTCCTTACGAGGAGACT | 1899 |
| Fut8_CasPhi12_6_S | TTGTTAAAGGAGGCAA | |
| R2887_Fut8_ | ATTGCTCCTTACGAGGAGACT | 1900 |
| CasPhi12_nsd_sg1_S | CCCCAGAGTCCATGTC | |
| R2888_Fut8_ | ATTGCTCCTTACGAGGAGACT | 1901 |
| CasPhi12_nsd_sg2_S | CAGTGCGTCTGACATG | |
| R2889_Fut8_ | ATTGCTCCTTACGAGGAGACG | 1902 |
| CasPhi12_nsd_sg3_S | TCAGTGCGTCTGACAT | |
| R2890_Fut8_ | ATTGCTCCTTACGAGGAGACC | 1903 |
| CasPhi12_nsd_sg4_S | CACTTTGTCAGTGCGT | |
| R2891_Fut8_ | ATTGCTCCTTACGAGGAGACT | 1904 |
| CasPhi12_nsd_sg5_S | GTTCCCACTTTGTCAG | |
| R2892_Fut8_ | ATTGCTCCTTACGAGGAGACC | 1905 |
| CasPhi12_nsd_sg6_S | TCAATGGGATGGAAGG | |
| R2893_Fut8_ | ATTGCTCCTTACGAGGAGACC | 1906 |
| CasPhi12_nsd_sg7_S | ATCCCATTGAGGAATA | |
| R2894_Fut8_ | ATTGCTCCTTACGAGGAGACA | 1907 |
| CasPhi12_nsd_sg8_S | GGAATACATGGTACAC | |
| R2895_Fut8_ | ATTGCTCCTTACGAGGAGACA | 1908 |
| CasPhi12_nsd_sg9_S | ACGTGTACCATGTATT | |
| R2896_Fut8_ | ATTGCTCCTTACGAGGAGACT | 1909 |
| CasPhi12_nsd_sg10_S | TCAACGTGTACCATGT | |
| R2897_Fut8_ | ATTGCTCCTTACGAGGAGACA | 1910 |
| CasPhi12_nsd_sg11_S | AGAACATTTTCAGCTT | |
| R2898_Fut8_ | ATTGCTCCTTACGAGGAGACG | 1911 |
| CasPhi12_nsd_sg12_S | AGAAGCTGAAAATGTT | |
| R2899_Fut8_ | ATTGCTCCTTACGAGGAGACT | 1912 |
| CasPhi12_nsd_sg13_S | CAGCTTCTCGAACGCA | |
| R2900_Fut8_ | ATTGCTCCTTACGAGGAGACC | 1913 |
| CasPhi12_nsd_sg14_S | AGCTTCTCGAACGCAG | |
| R2901_Fut8_ | ATTGCTCCTTACGAGGAGACT | 1914 |
| CasPhi12_nsd_sg15_S | GCGTTCGAGAAGCTGA | |
| R2902_Fut8_ | ATTGCTCCTTACGAGGAGACA | 1915 |
| CasPhi12_nsd_sg16_S | GCTTCTCGAACGCAGA | |
| R2903_Fut8_ | ATTGCTCCTTACGAGGAGACA | 1916 |
| CasPhi12_nsd_sg17_S | TTCTGCGTTCGAGAAG | |
| R2904_Fut8_ | ATTGCTCCTTACGAGGAGACC | 1917 |
| CasPhi12_nsd_sg18_S | ATTCTGCGTTCGAGAA | |
| R2905_Fut8_ | ATTGCTCCTTACGAGGAGACT | 1918 |
| CasPhi12_nsd_sg19_S | CGAACGCAGAATGAAA | |
| R2906_Fut8_ | ATTGCTCCTTACGAGGAGACA | 1919 |
| CasPhi12_nsd_sg20_S | TCCACTTTCATTCTGC | |
| R2907_Fut8_ | ATTGCTCCTTACGAGGAGACT | 1920 |
| CasPhi12_nsd_sg21_S | ATCCACTTTCATTCTG | |
| R2908_Fut8_ | ATTGCTCCTTACGAGGAGACT | 1921 |
| CasPhi12_nsd_s822_S | TATCCACTTTCATTCT | |
| R2909_Fut8_ | ATTGCTCCTTACGAGGAGACT | 1922 |
| CasPhi12_nsd_sg23_S | TTATCCACTTTCATTC | |
| R2910_Fut8_ | ATTGCTCCTTACGAGGAGACT | 1923 |
| CasPhi12_nsd_sg24_S | TTTATCCACTTTCATT | |
| R2911_Fut8_ | ATTGCTCCTTACGAGGAGACA | 1924 |
| CasPhi12_nsd_sg25_S | ACAAAGAAGGGTCATC | |
| R2912_Fut8_ | ATTGCTCCTTACGAGGAGACC | 1925 |
| CasPhi12_nsd_sg26_S | CTCCTTTAACAAAGAA | |
| R2913_Fut8_ | ATTGCTCCTTACGAGGAGACG | 1926 |
| CasPhi12_nsd_sg27_S | CCTCCTTTAACAAAGA | |
| R2914_Fut8_ | ATTGCTCCTTACGAGGAGACT | 1927 |
| CasPhi12_nsd_sg28_S | TTGTTAAAGGAGGCAA | |
| R2915_Fut8_ | ATTGCTCCTTACGAGGAGACG | 1928 |
| CasPhi12_nsd_sg29_S | TTAAAGGAGGCAAAGA | |
| R2916_Fut8_ | ATTGCTCCTTACGAGGAGACT | 1929 |
| CasPhi12_nsd_sg30_S | TAAAGGAGGCAAAGAC | |
| R2917_Fut8_ | ATTGCTCCTTACGAGGAGACT | 1930 |
| CasPhi12_nsd_sg31_S | CTTTGCCTCCTTTAAC | |
| R2918_Fut8_ | ATTGCTCCTTACGAGGAGACG | 1931 |
| CasPhi12_nsd_sg32_S | TCTTTGCCTCCTTTAA | |
| R2919_Fut8_ | ATTGCTCCTTACGAGGAGACG | 1932 |
| CasPhi12_nsd_sg33_S | TCTAACTTACTTTGTC | |
| R2920_Fut8_ | ATTGCTCCTTACGAGGAGACT | 1933 |
| CasPhi12_nsd_sg34_S | TGGTCTAACTTACTTT | |

TABLE AG
CasΦ.12 gRNAs targeting Fut8

| | | | Repeat | Spacer | crRNA |
|---|---|---|---|---|---|
| | Repeat | Spacer | sequence | sequence | sequence |
| Name | length | length | (5′→3′) | (5′→3′) | (5′→3′) |
| R3582 | 36 | 30 | CUUUCAAGA | AGGAAUACAU | CUUUCAAGACUAA |
| | | | CUAAUAGAU | GGUACACGUU | UAGAUUGCUCCUU |
| | | | UGCUCCUUA | GAAGAACAUU | ACGAGGAGACAGG |
| | | | CGAGGAGAC | (SEQ ID NO: | AAUACAUGGUACA |
| | | | (SEQ ID NO: | 1482) | CGUUGAAGAACAU |
| | | | 2469) | | U (SEQ ID |
| | | | | | NO: 1499) |
| R3583 | 36 | 29 | CUUUCAAGA | AGGAAUACAU | CUUUCAAGACUAA |
| | | | CUAAUAGAU | GGUACACGUU | UAGAUUGCUCCUU |
| | | | UGCUCCUUA | GAAGAACAU | ACGAGGAGACAGG |
| | | | CGAGGAGAC | (SEQ ID NO: | AAUACAUGGUACA |
| | | | (SEQ ID NO: | 1483) | CGUUGAAGAACAU |
| | | | 2469) | | (SEQ ID NO: 1500) |
| R3584 | 36 | 28 | CUUUCAAGA | AGGAAUACAU | CUUUCAAGACUAA |
| | | | CUAAUAGAU | GGUACACGUU | UAGAUUGCUCCUU |
| | | | UGCUCCUUA | GAAGAACA | ACGAGGAGACAGG |
| | | | CGAGGAGAC | (SEQ ID NO: | AAUACAUGGUACA |
| | | | (SEQ ID NO: | 1484) | CGUUGAAGAACA |
| | | | 2469) | | (SEQ ID NO: 1501) |
| R3585 | 36 | 27 | CUUUCAAGA | AGGAAUACAU | CUUUCAAGACUAA |
| | | | CUAAUAGAU | GGUACACGUU | UAGAUUGCUCCUU |
| | | | UGCUCCUUA | GAAGAAC | ACGAGGAGACAGG |
| | | | CGAGGAGAC | (SEQ ID NO: | AAUACAUGGUACA |
| | | | (SEQ ID NO: | 1485) | CGUUGAAGAAC |
| | | | 2469) | | (SEQ ID NO: 1502) |
| R3586 | 36 | 26 | CUUUCAAGA | AGGAAUACAU | CUUUCAAGACUAA |
| | | | CUAAUAGAU | GGUACACGUU | UAGAUUGCUCCUU |
| | | | UGCUCCUUA | GAAGAA (SEQ | ACGAGGAGACAGG |
| | | | CGAGGAGAC | ID NO: 1486) | AAUACAUGGUACA |
| | | | (SEQ ID NO: | | CGUUGAAGAA (SEQ |
| | | | 2469) | | ID NO: 1503) |
| R3587 | 36 | 25 | CUUUCAAGA | AGGAAUACAU | CUUUCAAGACUAA |
| | | | CUAAUAGAU | GGUACACGUU | UAGAUUGCUCCUU |
| | | | UGCUCCUUA | GAAGA (SEQ | ACGAGGAGACAGG |
| | | | CGAGGAGAC | ID NO: 1487) | AAUACAUGGUACA |
| | | | (SEQ ID NO: | | CGUUGAAGA (SEQ |
| | | | 2469) | | ID NO: 1504) |
| R3588 | 36 | 24 | CUUUCAAGA | AGGAAUACAU | CUUUCAAGACUAA |
| | | | CUAAUAGAU | GGUACACGUU | UAGAUUGCUCCUU |
| | | | UGCUCCUUA | GAAG (SEQ ID | ACGAGGAGACAGG |
| | | | CGAGGAGAC | NO: 1488) | AAUACAUGGUACA |
| | | | (SEQ ID NO: | | CGUUGAAG (SEQ ID |
| | | | 2469) | | NO: 1505) |
| R3589 | 36 | 23 | CUUUCAAGA | AGGAAUACAU | CUUUCAAGACUAA |
| | | | CUAAUAGAU | GGUACACGUU | UAGAUUGCUCCUU |
| | | | UGCUCCUUA | GAA (SEQ ID | ACGAGGAGACAGG |
| | | | CGAGGAGAC | NO: 1489) | AAUACAUGGUACA |
| | | | (SEQ ID NO: | | CGUUGAA (SEQ ID |
| | | | 2469) | | NO: 1506) |
| R3590 | 36 | 22 | CUUUCAAGA | AGGAAUACAU | CUUUCAAGACUAA |
| | | | CUAAUAGAU | GGUACACGUU | UAGAUUGCUCCUU |
| | | | UGCUCCUUA | GA | ACGAGGAGACAGG |
| | | | CGAGGAGAC | (SEQ ID NO: | AAUACAUGGUACA |
| | | | (SEQ ID NO: | 1490) | CGUUGA (SEQ ID |
| | | | 2469) | | NO: 1507) |
| R3591 | 36 | 21 | CUUUCAAGA | AGGAAUACAU | CUUUCAAGACUAA |
| | | | CUAAUAGAU | GGUACACGUU | UAGAUUGCUCCUU |
| | | | UGCUCCUUA | G (SEQ ID NO: | ACGAGGAGACAGG |
| | | | CGAGGAGAC | 1491) | AAUACAUGGUACA |
| | | | (SEQ ID NO: | | CGUUG (SEQ ID |
| | | | 2469) | | NO: 1508) |
| R3592 | 36 | 20 | CUUUCAAGA | AGGAAUACAU | CUUUCAAGACUAA |
| | | | CUAAUAGAU | GGUACACGUU | UAGAUUGCUCCUU |
| | | | UGCUCCUUA | (SEQ ID NO: | ACGAGGAGACAGG |
| | | | CGAGGAGAC | 1492) | AAUACAUGGUACA |
| | | | (SEQ ID NO: | | CGUU (SEQ ID |
| | | | 2469) | | NO: 1509) |
| R3593 | 36 | 19 | CUUUCAAGA | AGGAAUACAU | CUUUCAAGACUAA |
| | | | CUAAUAGAU | GGUACACGU | UAGAUUGCUCCUU |
| | | | UGCUCCUUA | (SEQ ID NO: | ACGAGGAGACAGG |
| | | | CGAGGAGAC | 1493) | AAUACAUGGUACA |
| | | | (SEQ ID NO: | | CGU (SEQ ID |
| | | | 2469) | | NO: 1510) |
| R3594 | 36 | 18 | CUUUCAAGA | AGGAAUACAU | CUUUCAAGACUAA |
| | | | CUAAUAGAU | GGUACACG | UAGAUUGCUCCUU |
| | | | UGCUCCUUA | (SEQ ID NO: | ACGAGGAGACAGG |
| | | | CGAGGAGAC | 1494) | AAUACAUGGUACA |
| | | | (SEQ ID NO: | | CG (SEQ ID |
| | | | 2469) | | NO: 1511) |
| R3595 | 36 | 17 | CUUUCAAGA | AGGAAUACAU | CUUUCAAGACUAA |
| | | | CUAAUAGAU | GGUACAC | UAGAUUGCUCCUU |
| | | | UGCUCCUUA | (SEQ ID NO: | ACGAGGAGACAGG |
| | | | CGAGGAGAC | 1495) | AAUACAUGGUACA |
| | | | (SEQ ID NO: | | C (SEQ ID |
| | | | 2469) | | NO: 1512) |
| R3596 | 36 | 16 | CUUUCAAGA | AGGAAUACAU | CUUUCAAGACUAA |
| | | | CUAAUAGAU | GGUACA (SEQ | UAGAUUGCUCCUU |
| | | | UGCUCCUUA | ID NO: 1496) | ACGAGGAGACAGG |
| | | | CGAGGAGAC | | AAUACAUGGUACA |
| | | | (SEQ ID NO: | | (SEQ ID |
| | | | 2469) | | NO: 1513) |
| R3597 | 36 | 15 | CUUUCAAGA | AGGAAUACAU | CUUUCAAGACUAA |
| | | | CUAAUAGAU | GGUAC (SEQ ID | UAGAUUGCUCCUU |
| | | | UGCUCCUUA | NO: 1497) | ACGAGGAGACAGG |
| | | | CGAGGAGAC | | AAUACAUGGUAC |
| | | | (SEQ ID NO: | | (SEQ ID |
| | | | 2469) | | NO: 1514) |
| R3598 | 35 | 20 | UUUCAAGAC | AGGAAUACAU | UUUCAAGACUAAU |
| | | | UAAUAGAUU | GGUACACGUU | AGAUUGCUCCUUA |
| | | | GCUCCUUAC | (SEQ ID NO: | CGAGGAGACAGGA |
| | | | GAGGAGAC | 1498) | AUACAUGGUACAC |
| | | | (SEQ ID NO: | | GUU (SEQ ID |
| | | | 1466) | | NO: 1515) |
| R3599 | 34 | 20 | UUCAAGACU | AGGAAUACAU | UUCAAGACUAAUA |
| | | | AAUAGAUUG | GGUACACGUU | GAUUGCUCCUUAC |
| | | | CUCCUUACG | (SEQ ID NO: | GAGGAGACAGGAA |
| | | | AGGAGAC | 1498) | UACAUGGUACACG |
| | | | (SEQ ID NO: | | UU (SEQ ID |
| | | | 1467) | | NO: 1516) |
| R3600 | 33 | 20 | UCAAGACUA | AGGAAUACAU | UCAAGACUAAUAG |
| | | | AUAGAUUGC | GGUACACGUU | AUUGCUCCUUACG |
| | | | UCCUUACGA | (SEQ ID NO: | AGGAGACAGGAAU |
| | | | GGAGAC (SEQ | 1498) | ACAUGGUACACGU |
| | | | ID NO: 1468) | | U (SEQ ID |
| | | | | | NO: 1517) |
| R3601 | 32 | 20 | CAAGACUAA | AGGAAUACAU | CAAGACUAAUAGA |
| | | | UAGAUUGCU | GGUACACGUU | UUGCUCCUUACGA |
| | | | CCUUACGAG | (SEQ ID NO: | GGAGACAGGAAUA |
| | | | GAGAC (SEQ | 1498) | CAUGGUACACGUU |
| | | | ID NO: 1469) | | (SEQ ID NO: 1518) |
| R3602 | 31 | 20 | AAGACUAAU | AGGAAUACAU | AAGACUAAUAGAU |
| | | | AGAUUGCUC | GGUACACGUU | UGCUCCUUACGAG |
| | | | CUUACGAGG | (SEQ ID NO: | GAGACAGGAAUAC |
| | | | AGAC (SEQ ID | 1498) | AUGGUACACGUU |
| | | | NO: 1470) | | (SEQ ID NO: 1519) |
| R3603 | 30 | 20 | AGACUAAUA | AGGAAUACAU | AGACUAAUAGAUU |
| | | | GAUUGCUCC | GGUACACGUU | GCUCCUUACGAGG |
| | | | UUACGAGGA | (SEQ ID NO: | AGACAGGAAUACA |
| | | | GAC (SEQ ID | 1498) | UGGUACACGUU |
| | | | NO: 1471) | | (SEQ ID NO: 1520) |
| R3604 | 29 | 20 | GACUAAUAG | AGGAAUACAU | GACUAAUAGAUUG |
| | | | AUUGCUCCU | GGUACACGUU | CUCCUUACGAGGA |
| | | | UACGAGGAG | (SEQ ID NO: | GACAGGAAUACAU |
| | | | AC (SEQ ID | 1498) | GGUACACGUU (SEQ |
| | | | NO: 1472) | | ID NO: 1521) |
| R3605 | 28 | 20 | ACUAAUAGA | AGGAAUACAU | ACUAAUAGAUUGC |
| | | | UUGCUCCUU | GGUACACGUU | UCCUUACGAGGAG |
| | | | ACGAGGAGA | (SEQ ID NO: | ACAGGAAUACAUG |
| | | | C (SEQ ID NO: | 1498) | GUACACGUU (SEQ |
| | | | 1473) | | ID NO: 1522) |
| R3606 | 27 | 20 | CUAAUAGAU | AGGAAUACAU | CUAAUAGAUUGCU |
| | | | UGCUCCUUA | GGUACACGUU | CCUUACGAGGAGA |
| | | | CGAGGAGAC | (SEQ ID NO: | CAGGAAUACAUGG |
| | | | (SEQ ID NO: | 1498) | UACACGUU (SEQ ID |
| | | | 1474) | | NO: 1523) |
| R3607 | 26 | 20 | UAAUAGAUU | AGGAAUACAU | UAAUAGAUUGCUC |
| | | | GCUCCUUAC | GGUACACGUU | CUUACGAGGAGAC |
| | | | GAGGAGAC | (SEQ ID NO: | AGGAAUACAUGGU |
| | | | (SEQ ID NO: | 1498) | ACACGUU (SEQ ID |
| | | | 1475) | | NO: 1524) |
| R3608 | 25 | 20 | AAUAGAUUG | AGGAAUACAU | AAUAGAUUGCUCC |
| | | | CUCCUUACG | GGUACACGUU | UUACGAGGAGACA |
| | | | AGGAGAC | AGGAAUACAU | GGAAUACAUGGUA |
| | | | (SEQ ID NO: | GGUACACGUU | CACGUU (SEQ ID |
| | | | 1476) | (SEQ ID NO: | NO: 1525) |
| | | | | 2487) | |
| R3609 | 24 | 20 | AUAGAUUGC | AGGAAUACAU | AUAGAUUGCUCCU |
| | | | UCCUUACGA | GGUACACGUU | UACGAGGAGACAG |
| | | | GGAGAC (SEQ | AGGAAUACAU | GAAUACAUGGUAC |
| | | | ID NO: 1477) | GGUACACGUU | ACGUU (SEQ ID |
| | | | | (SEQ ID NO: | NO: 1526) |
| | | | | 2487) | |
| R3610 | 23 | 20 | UAGAUUGCU | AGGAAUACAU | UAGAUUGCUCCUU |
| | | | CCUUACGAG | GGUACACGUU | ACGAGGAGACAGG |
| | | | GAGAC (SEQ | AGGAAUACAU | AAUACAUGGUACA |
| | | | ID NO: 1478) | GGUACACGUU | CGUU (SEQ ID |
| | | | | (SEQ ID NO: | NO: 1527) |
| | | | | 2487) | |
| R3611 | 22 | 20 | AGAUUGCUC | AGGAAUACAU | AGAUUGCUCCUUA |
| | | | CUUACGAGG | GGUACACGUU | CGAGGAGACAGGA |
| | | | AGAC (SEQ ID | AGGAAUACAU | AUACAUGGUACAC |
| | | | NO: 1479) | GGUACACGUU | GUU (SEQ ID |
| | | | | (SEQ ID NO: | NO: 1528) |
| | | | | 2487) | |
| R3612 | 21 | 20 | GAUUGCUCC | AGGAAUACAU | GAUUGCUCCUUAC |
| | | | UUACGAGGA | GGUACACGUU | GAGGAGACAGGAA |
| | | | GAC (SEQ ID | AGGAAUACAU | UACAUGGUACACG |
| | | | NO: 1480) | GGUACACGUU | UU (SEQ ID |
| | | | | (SEQ ID NO: | NO: 1529) |
| | | | | 2487) | |
| R3613 | 20 | 20 | AUUGCUCCU | AGGAAUACAU | AUUGCUCCUUACG |
| | | | UACGAGGAG | GGUACACGUU | AGGAGACAGGAAU |
| | | | AC (SEQ ID | AGGAAUACAU | ACAUGGUACACGU |
| | | | NO: 1481) | GGUACACGUU | U (SEQ ID |
| | | | | (SEQ ID NO: | NO: 1530) |
| | | | | 2487) | |

TABLE AH
Casd.12 gRNAs targeting B2M and TRAC

| | | | Repeat | Spacer | |
|---|---|---|---|---|---|
| | | | sequence | sequence | crRNA sequence |
| Name | Target | Modification | (5′->3′) | (5′->3′) | (5′->3′) |
| R3150 | B2M | Unmodified, | AUUGCUC | CAGUGGGGG | AUUGCUCCUUAC |
| 20-20 | Exon 2 | 2′OMe at last | CUUACGA | UGAAUUCAG | GAGGAGACCAG |
| | | 31 base (2me) | GGAGAC | UG (SEQ ID | UGGGGGUGAAU |
| | | 2′OMe at last | (SEQ ID | NO: 1434) | UCAGUG (SEQ ID |
| | | two 3′ bases | NO: 1433) | | NO: 1435) |
| | | (2me) | | | |
| | | 2′OMe at last | | | |
| | | three 3′ bases | | | |
| | | (3me) | | | |
| R3042 | TRAC | Unmodified, | AUUGCUC | GAGUCUCUC | AUUGCUCCUUAC |
| 20-20 | Exon 1 | 2me | CUUACGA | AGCUGGUAC | GAGGAGACGAG |
| | | 2me | GGAGAC | AC (SEQ ID | UCUCUCAGCUGG |
| | | 3me | (SEQ ID | NO: 1436) | UACAC (SEQ ID |
| | | | NO: 1433) | | NO: 1437) |
| R3150 | B2M | Unmodified, | AUUGCUC | CAGUGGGGG | AUUGCUCCUUAC |
| 20-17 | Exon 2 | 2me | CUUACGA | UGAAUUCA | GAGGAGACCAG |
| | | 2me | GGAGAC | (SEQ ID NO: | UGGGGGUGAAU |
| | | 3me | (SEQ ID | 1438) | UCA (SEQ ID |
| | | | NO: 1433) | | NO: 1439) |
| R3042 | TRAC | Unmodified, | AUUGCUC | CAGUGGGGG | AUUGCUCCUUAC |
| 20-17 | Exon 1 | 2me | CUUACGA | UGAAUUCA | GAGGAGACGAG |
| | | 2me | GGAGAC | (SEQ ID NO: | UCUCUCAGCUGG |
| | | 3me | (SEQ ID | 1440) | UA (SEQ ID |
| | | | NO: 1433) | | NO: 1441) |

[0257] In some embodiments, the guide nucleic acid comprises a spacer sequence that is the same as or differs by no more than 5 nucleotides from a spacer sequence from Tables A to H by no more than 4 nucleotides from a spacer sequence from Tables A to H, by no more than 3 nucleotides from a spacer sequence from Tables A to H, no more than 2 nucleotides from a spacer sequence from Tables A to H, or no more than 1 nucleotide from a spacer sequence from Tables A to H. A difference may be addition, deletion or substitution and where there are multiple differences, the differences may be addition, deletion and/or substitution.

[0258] In some embodiments, the guide nucleic acid comprises a sequence that is the same as or differs by no more than 5 nucleotides from a sequence from Tables I to AH by no more than 4 nucleotides from a sequence from Tables I to AH, by no more than 3 nucleotides from a sequence from Tables I to X, no more than 2 nucleotides from a sequence from Table I to AH, or no more than 1 nucleotide from a sequence from Tables I to AH. A difference may be addition, deletion or substitution and where there are multiple differences, the differences may be addition, deletion and/or substitution.

[0259] In some embodiments, the guide nucleic acid comprises a sequence that is at least 30, at least 31, at least 32, at least 33, at least 34, at least 35, at least 36, at least 37, at least 38, at least 39, at least 40, at least 41, at least 42, at least 43, at least 44, at least 45, at least 46, at least 47, at least 48, at least 49, at least 50, at least 51, at least 52, at least 53, at least 54, at least 55, at least 56 or at least 57 contiguous nucleobases of a sequence from Tables I to X, AG and AH (SEQ ID NO: 547-1404, 1433-1441, 1466-1530 or 2112-2289).

[0260] In some embodiments, the guide nucleic acid comprises a sequence that is 30, 31, 32, 33, 34, 35, 36, 37, 38, 39, 40, 41, 42, 43, 44, 45, 46, 47, 48, 49, 50, 51, 52, 53, 54, 55, 56 or 57 contiguous nucleobases of a sequence from Tables I to X, AG and AH (SEQ ID NO: 547-1404, 1433-1441, 1466-1530 or 2112-2289).

[0261] In some embodiments, the guide nucleic acid comprises a sequence that is at least 30, at least 31, at least 32, at least 33, at least 34, at least 35, at least 36 or at least 37 contiguous nucleobases of a sequence from Tables Y to AF (SEQ ID NO: 1533-1933 or 2290-2467).

[0262] In some embodiments, the guide nucleic acid comprises a sequence that is 30, 31, 32, 33, 34, 35, 36 or 37 contiguous nucleobases of a sequence from Tables Y to AF (SEQ ID NO: 1533-1933 or 2290-2467).

[0263] In some embodiments, the guide nucleic acid comprises a repeat sequence from Table 2 and a spacer sequence from Tables A to H

[0264] In the sequences provided in Tables A-AH, the base T is interchangeable with U when a guide nucleic either is or comprises ribonucleic or deoxyribonucleic nucleosides.

### Coding Sequences and Expression Vectors

[0265] In some aspects, the present disclosure provides a nucleic acid encoding a programmable CasΦ nuclease disclosed herein. In some embodiments, the nucleic acid is a vector, preferably the vector is an expression vector. Suitable expression vectors are easily identifiable for the cell type of interest. For example, an expression vector comprises a suitable promoter for transcription in the cell type of interest. An expression vector can also include other elements to support transcription, such as a Woodchuck Hepatitis Virus (WHP) Posttranscriptional regulatory Element (WPRE).

[0266] In some embodiments, a nucleic acid encoding a programmable CasΦ nuclease (e.g. within an expression vector) comprises elements suitable for expression in a eukaryotic cell. In some embodiments, the nucleic acid comprises a promoter suitable for transcription in a eukaryotic cell e.g. containing a TATA box and/or a TFIIB recognition element. The nucleic acid (e.g. within an expression vector) will typically include a promoter suitable for transcription in a eukaryotic cell upstream of the sequence encoding the programmable CasΦ nuclease, and may include a transcription terminator downstream of the sequence encoding the programmable CasΦ nuclease. The nucleic acid (e.g. within an expression vector) may also include enhancer(s) upstream and/or downstream of the sequence encoding the programmable CasΦ nuclease. A promoter may be an inducible promoter. The nucleic acid may also comprise a guide RNA. Suitable promoters are well known in the art and include the CMV promoter, EF1a promoter, intron-less EF1a short promoter, SV40 promoter, human or mouse PGK1 promoter, Ubc (ubiquitin C) promoter and mouse or human U6 promoter. Suitable mammalian promoters include the EFla promoter, intron-less EFla short promoter, and human U6 promoter.

[0267] In some embodiments, the vector is a viral vector. In some embodiments, the vector is a retroviral vector or a lentiviral vector. In preferred embodiments, the vector is an adeno-associated viral (AAV) vector. Several serotypes are available for AAV vectors that can be used in the compositions and methods disclosed herein, including AAV1, AAV2, AAV5, AAV6, AAV8, AAV9 and AAV DJ. In more preferred embodiments, the AAV vector is an AAV DJ vector.

[0268] A vector may be integrated into a host cell genome.

[0269] In some embodiments, a vector comprises a nucleic acid encoding a programmable CasΦ nuclease. In some embodiments, a vector comprises a nucleic acid encoding a guide nucleic acid. In some embodiments, a vector comprises a donor polynucleotide. In some embodiments, a nucleic acid encoding a programmable CasΦ nuclease, a nucleic acid encoding a guide nucleic acid and a donor polynucleotide are comprised by separate vectors. In some embodiments, a vector comprises a nucleic acid encoding a programmable CasΦ nuclease and a nucleic acid encoding a guide nucleic acid.

[0270] It is well known in the field that the large size of Cas9 nucleases makes Cas9 impractical for several applications. For example, packaging vectors into viral particles becomes more difficult as the size of the vector increases. It is therefore difficult to include other components in a viral vector that includes a nucleic acid encoding a Cas9 nuclease. Accordingly, one of the advantages of the programmable CasΦ nucleases disclosed herein arises from the smaller size of the programmable CasΦ nucleases which allows vectors comprising a nucleic acid encoding a programmable CasΦ nuclease to be easily packaged into viral particles when the vector also includes nucleic acids encoding other components, such a nucleic acid encoding a guide nucleic acid and/or donor polynucleotide. In preferred embodiments, a vector encodes a nucleic acid encoding a programmable CasΦ nuclease and a nucleic acid encoding a guide nucleic acid. In preferred embodiments, a vector encodes a nucleic acid encoding a programmable CasΦ nuclease, a nucleic acid encoding a guide nucleic acid and a donor polynucleotide. In some preferred embodiments, a vector comprises up to 1 kb donor polynucleotide, a promoter for expression of a guide nucleic acid, a nucleic acid encoding the nucleic acid, a mammalian promoter for expression of a programmable CasΦ nuclease, a nucleic acid encoding the programmable CasΦ nuclease, and a polyA signal. In alternative preferred embodiments, the donor polynucleotide is included in a nucleic acid encoding a tag, such as a fluorescent protein. In further preferred embodiments, the programmable CasΦ nuclease encoded by the vector is fuzed or linked to two nuclear localization signals.

[0271] In some embodiments, the expression vector comprises elements suitable for expression in a prokaryotic cell. In some embodiments, the expression vector comprises a promoter suitable for transcription in a prokaryotic cell e.g. comprising a Shine Dalgarno sequence.

[0272] In some embodiments, a CasΦ nuclease, a guide nucleic acid, or a nucleic acid encoding any combination thereof, may be inserted into a host cell by manner of electroporation, nucleofection, chemical methods, transfection, transduction, transformation, or microinjection. In some embodiments, a CasΦ nuclease, a guide nucleic acid, or a nucleic acid encoding any combination thereof, may be introduced into a cell by squeezing the cell to deform it, thereby disrupting the cell membrane and allowing the CasΦ nuclease, the guide nucleic acid, or the nucleic acid encoding any combination thereof, to pass into the cell.

[0273] In some embodiments, an Amaxa 4D nucleofector may be used to carry out nucleofection. In some embodiments, the chemical method or transfection comprises lipofectamine.

[0274] Lipid nanoparticle (LNP) delivery is one of the most clinically advanced non-viral delivery systems for gene therapy. LNPs have many properties that make them ideal candidates for delivery of nucleic acids, including ease of manufacture, low cytotoxicity and immunogenicity, high efficiency of nucleic acid encapsulation and cell transfection, multidosing capabilities and flexibility of design (Kulkarni et al., (2018) Nucleic Acid Therapeutics). In some embodiments, LNP is used to deliver a nucleic acid encoding a programmable CasΦ nuclease described herein. In some embodiments, LNP is used to deliver a nucleic acid encoding a guide nucleic acid. In some embodiments, LNP is used to deliver a nucleic acid encoding encoding a programmable CasΦ nuclease and a guide nucleic acid. In some embodiments, the LNP has an amine group to phosphate (N/P) ratio of between 2 and 10, between 3 and 10, or between 5 and 9. In preferred embodiments, the LNP has a N/P ratio of between 5 and 9. In more preferred embodiments, the LNP has a N/P ratio of 5. In some embodiments, the LNP additional components, e.g., nucleic acids, proteins, peptides, small molecules, sugars, lipids.

[0275] In more preferred embodiments, the LNP has a N/P ratio of 4 to 5. In preferred embodiments, the LNP comprises a nucleic acid encoding a programmable CasΦ nuclease, and the LNP has an N/P ratio of 4 to 5.

### Target Nucleic Acid and Sample

[0276] A wide array of samples is compatible with the compositions and methods disclosed herein. The samples, as described herein, may be used in the methods of nicking a target nucleic acid disclosed herein. The samples, as described herein, may be used in the DETECTR assay methods disclosed herein. The samples, as described herein, are compatible with any of the programmable nucleases disclosed herein and use of said programmable nuclease in a method of detecting a target nucleic acid. The samples, as described herein, are compatible with any of the compositions comprising a programmable nuclease and a buffer. Described herein are samples that contain deoxyribonucleic acid (DNA), ribonucleic acid (RNA), or both, which can be modified or detected using a programmable nuclease of the present disclosure. As described herein, programmable nucleases are activated upon binding to a target nucleic acid of interest in a sample upon hybridization of a guide nucleic acid to the target nucleic acid. Subsequently, the activated programmable nucleases exhibit sequence-independent cleavage of a nucleic acid in a reporter. The reporter additionally includes a detectable moiety, which is released upon sequence-independent cleavage of the nucleic acid in the reporter. The detectable moiety emits a detectable signal, which can be measured by various methods (e.g., spectrophotometry, fluorescence measurements, electrochemical measurements).

[0277] Various sample types comprising a target nucleic acid of interest are consistent with the present disclosure. These samples can comprise a target nucleic acid sequence for detection. In some embodiments, the detection of the target nucleic indicates an ailment, such as a disease, cancer, or genetic disorder, or genetic information, such as for phenotyping, genotyping, or determining ancestry and are compatible with the reagents and support mediums as described herein. Generally, a sample from an individual or an animal or an environmental sample can be obtained to test for presence of a disease, cancer, genetic disorder, or any mutation of interest. A biological sample from the individual may be blood, serum, plasma, saliva, urine, mucosal sample, peritoneal sample, cerebrospinal fluid, gastric secretions, nasal secretions, sputum, pharyngeal exudates, urethral or vaginal secretions, an exudate, an effusion, or tissue. A tissue sample may be dissociated or liquified prior to application to detection system of the present disclosure. A sample from an environment may be from soil, air, or water. In some instances, the environmental sample is taken as a swab from a surface of interest or taken directly from the surface of interest. In some instances, the raw sample is applied to the detection system. In some instances, the sample is diluted with a buffer or a fluid or concentrated prior to application to the detection system or be applied neat to the detection system. Sometimes, the sample is contained in no more 20 μl. The sample, in some cases, is contained in no more than 1, 5, 10, 15, 20, 25, 30, 35 40, 45, 50, 55, 60, 65, 70, 75, 80, 90, 100, 200, 300, 400, 500 μl, or any of value from 1 μl to 500 μl, preferably from 10 μl to 200 μl, or more preferably from 50 μl to 100 μl. Sometimes, the sample is contained in more than 500 μl.

[0278] In some embodiments, the target nucleic acid is single-stranded DNA. The methods, reagents, enzymes, and kits disclosed herein may enable the direct detection of a DNA encoding a sequence of interest, in particular a single-stranded DNA encoding a sequence of interest, without transcribing the DNA into RNA, for example, by using an RNA polymerase. The compositions and methods disclosed herein may enable the detection of target nucleic acid that is an amplified nucleic acid of a nucleic acid of interest. In some embodiments, the target nucleic acid is a cDNA, genomic DNA, an amplicon of genomic DNA or a DNA amplicon of an RNA. A nucleic acid can encode a sequence from a genomic locus. In some cases, the target nucleic acid that binds to the guide nucleic acid is from 5 to 100, 5 to 90, 5 to 80, 5 to 70, 5 to 60, 5 to 50, 5 to 40, 5 to 30, 5 to 25, 5 to 20, 5 to 15, or 5 to 10 nucleotides in length. The nucleic acid can be from 10 to 90, from 20 to 80, from 30 to 70, or from 40 to 60 nucleotides in length. A nucleic acid can be 5, 6, 7, 8, 9, 10, 11, 12, 13, 14, 15, 16, 17, 18, 19, 20, 21, 22, 23, 24, 25, 26, 27, 28, 29, 30, 31, 32, 33, 34, 35, 36, 37, 38, 39, 40, 45, 50, 60, 70, 80, 90, or 100 nucleotides in length. The target nucleic acid can encode a sequence reverse complementary to a guide nucleic acid sequence.

[0279] In some instances, the sample is taken from single-cell eukaryotic organisms; a plant or a plant cell; an algal cell; a fungal cell; an animal cell, tissue, or organ; a cell, tissue, or organ from an invertebrate animal; a cell, tissue, fluid, or organ from a vertebrate animal such as fish, amphibian, reptile, bird, and mammal; a cell, tissue, fluid, or organ from a mammal such as a human, a non-human primate, an ungulate, a feline, a bovine, an ovine, and a caprine. In some instances, the sample is taken from nematodes, protozoans, helminths, or malarial parasites. In some cases, the sample comprises nucleic acids from a cell lysate from a eukaryotic cell, a mammalian cell, a human cell, a prokaryotic cell, or a plant cell. In some cases, the sample comprises nucleic acids expressed from a cell.

[0280] The sample described herein may comprise at least one target nucleic acid. The target nucleic acid comprises a segment that is reverse complementary to a segment of a guide nucleic acid. Often, the sample comprises the segment of the target nucleic acid and at least one nucleic acid comprising at least 50% sequence identity to a segment of the target nucleic acid. Sometimes, the at least one nucleic acid comprises a segment comprising at least 60%, 70%, 75%, 80%, 85%, 90%, 91%, 92%, 93%, 94%, 95%, 96%, 97%, 98%, or 99% sequence identity to the segment of the target nucleic acid. Often, a sample comprises the segment of the target nucleic acid and at least one nucleic acid a segment comprising less than 100% sequence identity to the target nucleic acid but no less than 50% sequence identity to the segment of the target nucleic acid. Sometimes, a sample comprises the segment of the target nucleic acid and at least one nucleic acid a segment comprising less than 100% sequence identity to the target nucleic acid but no less than 60%, 70%, 75%, 80%, 85%, 90%, 91%, 92%, 93%, 94%, 95%, 96%, 97%, 98%, or 99% sequence identity to the segment of the target nucleic acid. For example, the segment of the target nucleic acid comprises a mutation as compared to at least one nucleic acid comprising a segment comprising less than 100% sequence identity to the segment of the target nucleic acid but no less than 50% sequence identity to the segment of the target nucleic acid. Sometimes, the segment of the target nucleic acid comprises a mutation as compared to at least one nucleic acid comprising a segment comprising less than 100% sequence identity to the segment of the target nucleic acid but no less than 60%, 70%, 75%, 80%, 85%, 90%, 91%, 92%, 93%, 94%, 95%, 96%, 97%, 98%, or 99% sequence identity to the segment of the target nucleic acid. Often, the segment of the target nucleic acid comprises a mutation as compared to at least one nucleic acid comprising a segment comprising less than 100% sequence identity to the segment of the target nucleic acid but no less than 50% sequence identity to the segment of the target nucleic acid. The mutation can be a mutation of 1, 2, 3, 4, 5, 6, 7, 8, 9, 10, 11, 12, 13, 14, 15, 16, 17, 18, 19, 20 or more nucleotides. Often, the mutation is a single nucleotide mutation.

[0281] The single nucleotide mutation can be a single nucleotide polymorphism (SNP), which is a single base pair variation in a DNA sequence present in less than 1% of a population. Sometimes, the target nucleic acid comprises a single nucleotide mutation, wherein the single nucleotide mutation comprises the wild type variant of the SNP. The single nucleotide mutation or SNP can be associated with a phenotype of the sample or a phenotype of the organism from which the sample was taken. The SNP, in some cases, is associated with altered phenotype from wild type phenotype. Often, the segment of the target nucleic acid sequence comprises a deletion as compared to at least one nucleic acid comprising a segment comprising less than 100% sequence identity to the segment of the target nucleic acid but no less than 50% sequence identity to the segment of the target nucleic acid. The mutation can be a deletion of 1, 2, 3, 4, 5, 6, 7, 8, 9, 10, 11, 12, 13, 14, 15, 16, 17, 18, 19, 20 or more nucleotides. The mutation can be a deletion of about 5, about 10, about 15, about 20, about 25, about 30, about 35, about 40, about 45, about 50, about 55, about 60, about 65, about 70, about 75, about 80, about 85, about 90, about 95, about 100, about 200, about 300, about 400, about 500, about 600, about 700, about 800, about 900, or about 1000 nucleotides. The mutation can be a deletion of from 1 to 5, from 5 to 10, from 10 to 15, from 15 to 20, from 20 to 25, from 25 to 30, from 30 to 35, from 35 to 40, from 40 to 45, from 45 to 50, from 50 to 55, from 55 to 60, from 60 to 65, from 65 to 70, from 70 to 75, from 75 to 80, from 80 to 85, from 85 to 90, from 90 to 95, from 95 to 100, from 100 to 200, from 200 to 300, from 300 to 400, from 400 to 500, from 500 to 600, from 600 to 700, from 700 to 800, from 800 to 900, from 900 to 1000, from 1 to 50, from 1 to 100, from 25 to 50, from 25 to 100, from 50 to 100, from 100 to 500, from 100 to 1000, or from 500 to 1000 nucleotides. The segment of the target nucleic acid that the guide nucleic acid of the methods describe herein binds to comprises the mutation, such as the SNP or the deletion. The mutation can be a single nucleotide mutation or a SNP. The SNP can be a synonymous substitution or a nonsynonymous substitution. The nonsynonymous substitution can be a missense substitution or a nonsense point mutation. The synonymous substitution can be a silent substitution. The mutation can be a deletion of one or more nucleotides. Often, the single nucleotide mutation, SNP, or deletion is associated with a disease such as cancer or a genetic disorder. The mutation, such as a single nucleotide mutation, a SNP, or a deletion, can be encoded in the sequence of a target nucleic acid from the germline of an organism or can be encoded in a target nucleic acid from a diseased cell, such as a cancer cell.

[0282] The sample used for disease testing may comprise at least one target nucleic acid that can bind to a guide nucleic acid of the reagents described herein. The sample used for disease testing may comprise at least nucleic acid of interest that is amplified to produce a target nucleic acid that can bind to a guide nucleic acid of the reagents described herein. The nucleic acid of interest can comprise DNA, RNA, or a combination thereof.

[0283] The target nucleic acid (e.g., a target DNA) may be a portion of a nucleic acid from a virus or a bacterium or other agents responsible for a disease in the sample. The target nucleic acid may be a portion of a nucleic acid from a gene expressed in a cancer or genetic disorder in the sample. In some cases, the sequence is a segment of a target nucleic acid sequence. A segment of a target nucleic acid sequence can be from a genomic locus, a transcribed mRNA, or a reverse transcribed cDNA. A segment of a target nucleic acid sequence can be from 5 to 100, 5 to 90, 5 to 80, 5 to 70, 5 to 60, 5 to 50, 5 to 40, 5 to 30, 5 to 25, 5 to 20, 5 to 15, or 5 to 10 nucleotides in length. A segment of a target nucleic acid sequence can be 5, 6, 7, 8, 9, 10, 11, 12, 13, 14, 15, 16, 17, 18, 19, 20, 21, 22, 23, 24, 25, 26, 27, 28, 29, 30, 31, 32, 33, 34, 35, 36, 37, 38, 39, 40, 45, 50, 60, 70, 80, 90, or 100 nucleotides in length. The sequence of the target nucleic acid segment can be reverse complementary to a segment of a guide nucleic acid sequence. The target nucleic acid may comprise a genetic variation (e.g., a single nucleotide polymorphism), with respect to a standard sample, associated with a disease phenotype or disease predisposition. The target nucleic acid may be an amplicon of a portion of an RNA, may be a DNA, or may be a DNA amplicon from any organism in the sample.

[0284] In some embodiments, the target nucleic acid sequence comprises a nucleic acid sequence of a virus or a bacterium or other agents responsible for a disease in the sample. In some embodiments, the target nucleic acid comprises DNA that is reverse transcribed from RNA using a reverse transcriptase prior to detection by a programmable nuclease using the compositions, systems, and methods disclosed herein. The target nucleic acid, in some cases, is a portion of a nucleic acid from a sexually transmitted infection or a contagious disease, in the sample. In some cases, the target nucleic acid is a portion of a nucleic acid from a genomic locus, or any DNA amplicon, such as a reverse transcribed mRNA or a cDNA from a gene locus, a transcribed mRNA, or a reverse transcribed cDNA from a gene locus in at least one of: human immunodeficiency virus (HIV), human papillomavirus (HPV), chlamydia, gonorrhea, syphilis, trichomoniasis, sexually transmitted infection, malaria, Dengue fever, Ebola, chikungunya, and leishmaniasis. Pathogens include viruses, fungi, helminths, protozoa, malarial parasites, Plasmodium parasites, Toxoplasma parasites, and Schistosoma parasites. Helminths include roundworms, heartworms, and phytophagous nematodes, flukes, Acanthocephala, and tapeworms. Protozoan infections include infections from Giardia spp., Trichomonas spp., African trypanosomiasis, amoebic dysentery, babesiosis, balantidial dysentery, Chaga's disease, coccidiosis, malaria and toxoplasmosis. Examples of pathogens such as parasitic/protozoan pathogens include, but are not limited to: Plasmodium falciparum, P. vivax, Trypanosoma cruzi and Toxoplasma gondii. Fungal pathogens include, but are not limited to Cryptococcus neoformans, Histoplasma capsulatum, Coccidioides immitis, Blastomyces dermatitides, Chlamydia trachomatis, and Candida albicans. Pathogenic viruses include but are not limited to coronavirus; immunodeficiency virus (e.g., HIV); influenza virus; dengue; West Nile virus; herpes virus; yellow fever virus; Hepatitis Virus C; Hepatitis Virus A; Hepatitis Virus B; papillomavirus; and the like. Pathogens include, e.g., HIV virus, Mycobacterium tuberculosis, Streptococcus agalactiae, methicillin-resistant Staphylococcus aureus, Legionella pneumophila, Streptococcus pyogenes, Escherichia coli, Neisseria gonorrhoeae, Neisseria meningitidis, Pneumococcus, Cryptococcus neoformans, Histoplasma capsulatum, Hemophilus influenzae B, Treponema pallidum, Lyme disease spirochetes, Pseudomonas aeruginosa, Mycobacterium leprae, Brucella abortus, rabies virus, influenza virus, cytomegalovirus, herpes simplex virus I, herpes simplex virus II, human serum parvo-like virus, respiratory syncytial virus (RSV), M. genitalium, T. vaginalis, varicella-zoster virus, hepatitis B virus, hepatitis C virus, measles virus, adenovirus, human T-cell leukemia viruses, Epstein-Barr virus, murine leukemia virus, mumps virus, vesicular stomatitis virus, Sindbis virus, lymphocytic choriomeningitis virus, wart virus, blue tongue virus, Sendai virus, feline leukemia virus, Reovirus, polio virus, simian virus 40, mouse mammary tumor virus, dengue virus, rubella virus, West Nile virus, Plasmodium falciparum, Plasmodium vivax, Toxoplasma gondii, Trypanosoma rangeli, Trypanosoma cruzi, Trypanosoma rhodesiense, Trypanosoma brucei, Schistosoma mansoni, Schistosoma japonicum, Babesia bovis, Eimeria tenella, Onchocerca volvulus, Leishmania tropica, Mycobacterium tuberculosis, Trichinella spiralis, Theileria parva, Taenia hydatigena, Taenia ovis, Taenia saginata, Echinococcus granulosus, Mesocestoides corti, Mycoplasma arthritidis, M. hyorhinis, M. orale, M. arginini, Acholeplasma laidlawii, M. salivarium and M. pneumoniae. In some cases, the target sequence is a portion of a nucleic acid from a genomic locus, a transcribed mRNA, or a reverse transcribed cDNA from a gene locus of bacterium or other agents responsible for a disease in the sample comprising a mutation that confers resistance to a treatment, such as a single nucleotide mutation that confers resistance to antibiotic treatment. In some cases, the mutation that confers resistance to a treatment is a deletion.

[0285] Compositions and methods of the disclosure can be used for cell line engineering (e.g., engineering a cell from a cell line for bioproduction). For example, compositions and methods of the disclosure can be used to express a desired protein from a cell line. In some embodiments, the target nucleic acid sequence comprises a nucleic acid sequence of a cell line. In some embodiments, the target nucleic acid sequence comprises a genomic nucleic acid sequence of a cell line. In some embodiments, the cell line is a Chinese hamster ovary cell line (CHO), human embryonic kidney cell line (HEK), cell lines derived from cancer cells, cell lines derived from lymphocytes, and the like. Non-limiting examples of cell lines includes: C8161, CCRF-CEM, MOLT, mIMCD-3, NHDF, HeLa-S3, Huh1, Huh4, Huh7, HUVEC, HASMC, HEKn, HEKa, MiaPaCell, Panc1, PC-3, TF1, CTLL-2, CIR, Rat6, CV1, RPTE, A10, T24, J82, A375, ARH-77, Calu1, SW480, SW620, SKOV3, SK-UT, CaCo2, P388D1, SEM-K2, WEHI-231, HB56, TIB55, Jurkat, J45.01, LRMB, Bc1-1, BC-3, IC21, DLD2, Raw264.7, NRK, NRK-52E, MRCS, MEF, Hep G2, HeLa B, HeLa T4, COS, COS-1, COS-6, COS-M6A, BS-C-1 monkey kidney epithelial, BALB/3T3 mouse embryo fibroblast, 3T3 Swiss, 3T3-L1, 132-d5 human fetal fibroblasts; 10.1 mouse fibroblasts, 293-T, 3T3, 721, 9L, A2780, A2780ADR, A2780cis, A172, A20, A253, A431, A-549, ALC, AsPC-1, B16, B35, BCP-1 cells, BEAS-2B, bEnd.3, BHK-21, BR 293, BxPC3, C3H-10T1/2, C6/36, Cal-27, Capan-1, CHO, CHO-7, CHO-IR, CHO-K1, CHO-K2, CHO-S, CHO-T, CHO Dhfr−/−, COR-L23, COR-L23/CPR, COR-L23/5010, COR-L23/R23, COS-7, COV-434, CML T1, CMT, CT26, D17, DH82, DU145, DuCaP, EL4, EM2, EM3, EMT6/AR1, EMT6/AR10.0, FM3, H1299, H69, HAP1, HB54, HB55, HCA2, HEK-293, HeLa, Hepa1-6, Hep3B, Hepa1 cic7, HL-60, HMEC, HT-29, Jurkat, JY cells, K562 cells, Ku812, KCL22, KG1, KYO1, LNCap, Ma-Mel 1-48, MC-38, MCF-7, MCF-10A, MDA-MB-231, MDA-MB-468, MDA-MB-435, MDCK II, MDCK II, MOR/0.2R, MONO-MAC 6, MTD-1A, MyEnd, NCI-H69/CPR, NCI-H69/LX10, NCI-H69/LX20, NCI-H69/LX4, NIH-3T3, NALM-1, Neuro2A, NK92, NW-145, OPCN/OPCT cell lines, Peer, PNT-1A/PNT 2, RenCa, RIN-5F, RMA/RMAS, Saos-2 cells, Sf-9, SkBr3, T2, T-47D, T84, THP1 cell line, U373, U87, U937, VCaP, Vero cells, WM39, WT-49, X63, YAC-1, and YAR. Non-limiting examples of other cells that can be used with the disclosure include immune cells, such as CART, T-cells, B-cells, NK cells (including iNK cells), granulocytes, basophils, eosinophils, neutrophils, mast cells, monocytes, macrophages, dendritic cells, antigen-presenting cells (APC), or adaptive cells. Non-limiting examples of cells that can be used with this disclosure also include plant cells, such as parenchyma, sclerenchyma, collenchyma, xylem, phloem, germline (e.g., pollen). Cells may be from lycophytes, ferns, gymnosperms, angiosperms, bryophytes, charophytes, chloropytes, rhodophytes, or glaucophytes. Cells may be obtained from non-human animals, including, but not limited to, rats, dogs, rabbits, cats, and monkeys. Non-limiting examples of cells that can be used with this disclosure also include stem cells, such as human stem cells, animal stem cells, stem cells that are not derived from human embryonic stem cells, embryonic stem cells, mesenchymal stem cells, pluripotent stem cells, induced pluripotent stem cells (iPS), somatic stem cells, adult stem cells, hematopoietic stem cells, tissue-specific stem cells. Non-limiting examples of cells that can be used with this disclosure also include neuronal cells from various organs of an animal, e.g., brain, heart, lung, liver, pancreas, and muscle. In preferred embodiments, the cells that can be used with the disclosure are T cells, such as CAR-T (CART) cells.

[0286] CHO cells are an epithelial cell line which is particularly useful in biological and medical research. In particular, CHO cells are frequently used for the industrial production of recombinant therapeutics. In some embodiments, a CasΦ polypeptide disclosed herein is expressed in a CHO cell. In some embodiments, a CasΦ polypeptide disclosed herein complexed with a guide nucleic is expressed in a CHO cell. In some embodiments, a method disclosed herein comprises modifying or editing a CHO cell. In some embodiments, a modified CHO cell is provided wherein the CHO cell is modified by a CasΦ polypeptide disclosed herein. In some embodiments, a CHO cell is provided wherein the CHO cell comprises a CasΦ polypeptide disclosed herein.

[0287] T cells are important therapeutic targets. In some embodiments, a CasΦ polypeptide disclosed herein is expressed in a T cell. In some embodiments, a CasΦ polypeptide disclosed herein complexed with a guide nucleic is expressed in a T cell. In some embodiments, a method disclosed herein comprises modifying or editing a T cell. In some embodiments, a method disclosed herein comprises modifying a PDCD1 gene of a T cell. In some embodiments, a method disclosed herein comprises modifying a TRAC gene of a T cell. In some embodiments, a method disclosed herein comprises modifying a B2M gene of a T cell. In some embodiments, a method disclosed herein comprises modifying a PDCD1 gene of a T cell, a TRAC gene of a T cell, a B2M gene of a T cell or a combination thereof. In some embodiments, a method disclosed herein comprises modifying a PDCD1 gene, a TRAC gene, and a B2M gene of a T cell. In some embodiments, a modified T cell is provided wherein the T cell is modified by a CasΦ polypeptide disclosed herein. In some embodiments, a T cell is provided wherein the T cell comprises a CasΦ polypeptide disclosed herein.

[0288] T cells, also known as T lymphocytes, are easily identifiable by the surface expression of the T-cell receptor (TCR). In some embodiments, the T cells include one or more subsets of T cells, such as CD4+ cells, CD8+ cells, and sub-populations thereof. In some embodiments, a T cell is a CD4+ cell. In some embodiments, a T cell is a CD8+ T cells. In some embodiments, a population of T cells comprises CD4+ T cells and CD8+ T cells. In some embodiments, T cells comprise TCR-T, Tscm, or iT cells.

[0289] Sub-populations of CD4+ and CD8+ T cells include naive T cells, effector T cells, memory T cells, immature T cells, mature T cells, helper T cells, cytotoxic T cells, regulatory T cells, alpha/beta T cells, and delta/gamma T cells. Sub-types of memory T cells include stem cell memory T cells, central memory T cells, effector memory T cells, and terminally differentiated effector memory T cells. Sub-types of helper T cells, include T helper 1 cells, T helper 2 cells, T helper 3 cells, T helper 17 cells, T helper 9 cells, T helper 22 cells, and follicular helper T cells. In some embodiments, the cell is a regulatory T cell (Treg).

[0290] CART cells are T cells that have been genetically engineered to express unique chimeric antigen receptors (CARs) targeting specific antigens. CART cells are important targets for immunotherapy. In some embodiments, a CasΦ polypeptide disclosed herein is expressed in a CART cell. In some embodiments, a CasΦ polypeptide disclosed herein complexed with a guide nucleic is expressed in a CART cell. In some embodiments, a method disclosed herein comprises modifying or editing a CART cell. In some embodiments, a modified CART cell is provided wherein the CART cell is modified by a CasΦ polypeptide disclosed herein. In some embodiments, a CART cell is provided wherein the CART cell comprises a CasΦ polypeptide disclosed herein.

[0291] Modified stem cells and methods of modifying stem cells are also provided. In some embodiments, a CasΦ polypeptide disclosed herein is expressed in a stem cell. In some embodiments, a CasΦ polypeptide disclosed herein complexed with a guide nucleic is expressed in a stem cell. In some embodiments, a method disclosed herein comprises modifying or editing a stem cell. In some embodiments, a modified stem cell is provided wherein a stem cell is modified by a CasΦ polypeptide disclosed herein. In some embodiments, a stem cell is provided wherein the stem cell comprises a CasΦ polypeptide disclosed herein. In some embodiments, a modified stem cell is obtained or is obtainable by a method disclosed herein. In some embodiments, a modified stem cell is provided wherein the CART cell is modified by a CasΦ polypeptide disclosed herein.

[0292] Induced pluripotent stem cells (iPSCs) are pluripotent stem cells that are generated from somatic cells. They can propagate indefinitely and give rise to any cell type in the body. These features make iPSCs a powerful tool for researching human disease and provide a promising prospect for cell therapies for a range of medical conditions. iPSCs can be generated in a patient-specific manner and used in autologous transplant, thereby overcoming complications of rejection by the host immune system (Moradi et al. (2019), Stem Cell Research & Therapy).

[0293] In some embodiments, a CasΦ polypeptide disclosed herein is expressed in an induced pluripotent stem cell. In some embodiments, a CasΦ polypeptide disclosed herein complexed with a guide nucleic is expressed in an induced pluripotent stem cell. In some embodiments, a method disclosed herein comprises modifying or editing an induced pluripotent stem cell. In some embodiments, a modified induced pluripotent stem cell is provided wherein an induced pluripotent stem cell is modified by a CasΦ polypeptide disclosed herein. In some embodiments, an induced pluripotent stem cell is provided wherein the induced pluripotent stem cell comprises a CasΦ polypeptide disclosed herein. In some embodiments, a modified induced pluripotent cell is obtained or is obtainable by a method disclosed herein.

[0294] Hematopoietic stem cells (HSCs) are identifiable by the marker CD34. HSCs are stem cells that differentiate to give rise blood cells, such as T and B lymphocytes, erythrocytes, monocytes and macrophages. HSCs are important cells for future stem cell therapies as they have the potential to be used to treat genetic blood cell diseases (Morgan et al. (2017), Cell Stem Cell).

[0295] In some embodiments, a CasΦ polypeptide disclosed herein is expressed in a hematopoietic stem cell. In some embodiments, a CasΦ polypeptide disclosed herein complexed with a guide nucleic is expressed in a hematopoietic stem cell. In some embodiments, a method disclosed herein comprises modifying or editing a hematopoietic stem cell. In some embodiments, a modified hematopoietic stem cell is provided wherein a hematopoietic stem cell is modified by a CasΦ polypeptide disclosed herein. In some embodiments, a hematopoietic stem cell is provided wherein the hematopoietic stem cell comprises a CasΦ polypeptide disclosed herein. In some embodiments, a modified hematopoietic stem cell is obtained or is obtainable by a method disclosed herein.

[0296] Compositions and methods of the disclosure can be used for agricultural engineering. For example, compositions and methods of the disclosure can be used to confer desired traits on a plant. A plant can be engineered for the desired physiological and agronomic characteristic using the present disclosure. In some embodiments, the target nucleic acid sequence comprises a nucleic acid sequence of a plant. In some embodiments, the target nucleic acid sequence comprises a genomic nucleic acid sequence of a plant cell. In some embodiments, the target nucleic acid sequence comprises a nucleic acid sequence of an organelle of a plant cell. In some embodiments, the target nucleic acid sequence comprises a nucleic acid sequence of a chloroplast of a plant cell.

[0297] The plant can be a monocotyledonous plant. The plant can be a dicotyledonous plant. Non-limiting examples of orders of dicotyledonous plants include Magniolales, Illiciales, Laurales, Piperales, Aristochiales, Nymphaeales, Ranunculales, Papeverales, Sarraceniaceae, Trochodendrales, Hamamelidales, Eucomiales, Leitneriales, Myricales, Fagales, Casuarinales, Caryophyllales, Batales, Polygonales, Plumbaginales, Dilleniales, Theales, Malvales, Urticales, Lecythidales, Violales, Salicales, Capparales, Ericales, Diapensales, Ebenales, Primulales, Rosales, Fabales, Podostemales, Haloragales, Myrtales, Cornales, Proteales, San tales, Rafflesiales, Celastrales, Euphorbiales, Rhamnales, Sapindales, Juglandales, Geraniales, Polygalales, Umbellales, Gentianales, Polemoniales, Lamiales, Plantaginales, Scrophulariales, Campanulales, Rubiales, Dipsacales, and Asterales.

[0298] Non-limiting examples of orders of monocotyledonous plants include Alismatales, Hydrocharitales, Najadales, Triuridales, Commelinales, Eriocaulales, Restionales, Poales, Juncales, Cyperales, Typhales, Bromeliales, Zingiberales, Arecales, Cyclanthales, Pandanales, Arales, Lilliales, and Orchid ales. A plant can belong to the order, for example, Gymnospermae, Pinales, Ginkgoales, Cycadales, Araucariales, Cupressales and Gnetales.

[0299] Non-limiting examples of plants include plant crops, fruits, vegetables, grains, soy bean, corn, maize, wheat, seeds, tomatoes, rice, cassava, sugarcane, pumpkin, hay, potatoes, cotton, cannabis, tobacco, flowering plants, conifers, gymnosperms, ferns, clubmosses, hornworts, liverworts, mosses, wheat, maize, rice, millet, barley, tomato, apple, pear, strawberry, orange, acacia, carrot, potato, sugar beets, yam, lettuce, spinach, sunflower, rape seed, Arabidopsis, alfalfa, amaranth, apple, apricot, artichoke, ash tree, asparagus, avocado, banana, barley, beans, beet, birch, beech, blackberry, blueberry, broccoli, Brussel's sprouts, cabbage, canola, cantaloupe, carrot, cassava, cauliflower, cedar, a cereal, celery, chestnut, cherry, Chinese cabbage, citrus, clementine, clover, coffee, corn, cotton, cowpea, cucumber, cypress, eggplant, elm, endive, eucalyptus, fennel, figs, fir, geranium, grape, grapefruit, groundnuts, ground cherry, gum hemlock, hickory, kale, kiwifruit, kohlrabi, larch, lettuce, leek, lemon, lime, locust, pine, maidenhair, maize, mango, maple, melon, millet, mushroom, mustard, nuts, oak, oats, oil palm, okra, onion, orange, an ornamental plant or flower or tree, papaya, palm, parsley, parsnip, pea, peach, peanut, pear, peat, pepper, persimmon, pigeon pea, pine, pineapple, plantain, plum, pomegranate, potato, pumpkin, radicchio, radish, rapeseed, raspberry, rice, rye, sorghum, safflower, sallow, soybean, spinach, spruce, squash, strawberry, sugar beet, sugarcane, sunflower, sweet potato, sweet corn, tangerine, tea, tobacco, tomato, trees, triticale, turf grasses, turnips, vine, walnut, watercress, watermelon, wheat, yams, yew, and zucchini. A plant can include algae.

[0300] In some embodiments, the target nucleic acid sequence comprises a nucleic acid sequence of a virus, a bacterium, or other pathogen responsible for a disease in a plant (e.g., a crop). Methods and compositions of the disclosure can be used to treat or detect a disease in a plant. For example, the methods of the disclosure can be used to target a viral nucleic acid sequence in a plant. A programmable nuclease of the disclosure (e.g., CasΦ) can cleave the viral nucleic acid. In some embodiments, the target nucleic acid sequence comprises a nucleic acid sequence of a virus or a bacterium or other agents (e.g., any pathogen) responsible for a disease in the plant (e.g., a crop). In some embodiments, the target nucleic acid comprises DNA that is reverse transcribed from RNA using a reverse transcriptase prior to detection by a programmable nuclease using the compositions, systems, and methods disclosed herein. The target nucleic acid, in some cases, is a portion of a nucleic acid from a virus or a bacterium or other agents responsible for a disease in the plant (e.g., a crop). In some cases, the target nucleic acid is a portion of a nucleic acid from a genomic locus, or any DNA amplicon, such as a reverse transcribed mRNA or a cDNA from a gene locus, a transcribed mRNA, or a reverse transcribed cDNA from a gene locus in at a virus or a bacterium or other agents (e.g., any pathogen) responsible for a disease in the plant (e.g., a crop). A virus infecting the plant can be an RNA virus. A virus infecting the plant can be a DNA virus. Non-limiting examples of viruses that can be targeted with the disclosure include Tobacco mosaic virus (TMV), Tomato spotted wilt virus (TSWV), Cucumber mosaic virus (CMV), Potato virus Y (PVY), Cauliflower mosaic virus (CaMV) (RT virus), Plum pox virus (PPV), Brome mosaic virus (BMV) and Potato virus X (PVX).

[0301] The sample used for cancer testing may comprise at least one target nucleic acid that can bind to a guide nucleic acid of the reagents described herein. The target nucleic acid, in some cases, comprises a portion of a gene comprising a mutation associated with cancer, a gene whose overexpression is associated with cancer, a tumor suppressor gene, an oncogene, a checkpoint inhibitor gene, a gene associated with cellular growth, a gene associated with cellular metabolism, or a gene associated with cell cycle. Sometimes, the target nucleic acid encodes a cancer biomarker, such as a prostate cancer biomarker or non-small cell lung cancer. In some cases, the assay can be used to detect “hotspots” in target nucleic acids that can be predictive of lung cancer. In some cases, the target nucleic acid comprises a portion of a nucleic acid that is associated with a blood fever. In some cases, the target nucleic acid is a portion of a nucleic acid from a genomic locus, any DNA amplicon of, a reverse transcribed mRNA, or a cDNA from a locus of at least one of: ALK, APC, ATM, AXIN2, BAP1, BARD1, BLM, BMPR1A, BRCA1, BRCA2, BRIP1, CASR, CDC73, CDH1, CDK4, CDKN1B, CDKN1C, CDKN2A, CEBPA, CHEK2, CTNNA1, DICER1, DIS3L2, EGFR, EPCAM, FH, FLCN, GATA2, GPC3, GREM1, HOXB13, HRAS, KIT, MAX, MEN1, MET, MITF, MLH1, MSH2, MSH3, MSH6, MUTYH, NBN, NF1, NF2, NTHL1, PALB2, PDGFRA, PHOX2B, PMS2, POLD1, POLE, POT1, PRKAR1A, PTCH1, PTEN, RAD50, RAD51C, RAD51D, RB1, RECQL4, RET, RUNX1, SDHA, SDHAF2, SDHB, SDHC, SDHD, SMAD4, SMARCA4, SMARCB1, SMARCE1, STK11, SUFU, TERC, TERT, TMEM127, TP53, TSC1, TSC2, VHL, WRN, and WT1. Any region of the aforementioned gene loci can be probed for a mutation or deletion using the compositions and methods disclosed herein. For example, in the EGFR gene locus, the compositions and methods for detection disclosed herein can be used to detect a single nucleotide polymorphism or a deletion. The SNP or deletion can occur in a non-coding region or a coding region. The SNP or deletion can occur in an Exon, such as Exon19. A SNP, deletion, or other mutation may mediate gene knockout.

[0302] The sample used for genetic disorder testing may comprise at least one target nucleic acid that can bind to a guide nucleic acid of the reagents described herein. In some embodiments, the genetic disorder is hemophilia, sickle cell anemia, 0-thalassemia, Duchene muscular dystrophy, severe combined immunodeficiency, Huntington's disease, or cystic fibrosis. The target nucleic acid, in some cases, is from a gene with a mutation associated with a genetic disorder, from a gene whose overexpression is associated with a genetic disorder, from a gene associated with abnormal cellular growth resulting in a genetic disorder, or from a gene associated with abnormal cellular metabolism resulting in a genetic disorder. In some cases, the target nucleic acid is a nucleic acid from a genomic locus, a transcribed mRNA, or a reverse transcribed mRNA, a DNA amplicon of or a cDNA from a locus of at least one of: CFTR, FMR1, SMN1, ABCB11, ABCC8, ABCD1, ACAD9, ACADM, ACADVL, ACAT1, ACOX1, ACSF3, ADA, ADAMTS2, ADGRG1, AGA, AGL, AGPS, AGXT, AIRE, ALDH3A2, ALDOB, ALG6, ALMS1, ALPL, AMT, AQP2, ARG1, ARSA, ARSB, ASL, ASNS, ASPA, ASS1, ATM, ATP6V1B1, ATP7A, ATP7B, ATRX, BBS1, BBS10, BBS12, BBS2, BCKDHA, BCKDHB, BCS1L, BLM, BSND, CAPN3, CBS, CDH23, CEP290, CERKL, CHM, CHRNE, CIITA, CLN3, CLN5, CLN6, CLN8, CLRN1, CNGB3, COL27A1, COL4A3, COL4A4, COL4A5, COL7A1, CPS1, CPT1A, CPT2, CRB1, CTNS, CTSK, CYBA, CYBB, CYP11B1, CYP11B2, CYP17A1, CYP19A1, CYP27A1, DBT, DCLRE1C, DHCR7, DHDDS, DLD, DMD, DNAH5, DNAI1, DNAI2, DYSF, EDA, EIF2B5, EMD, ERCC6, ERCC8, ESCO2, ETFA, ETFDH, ETHE1, EVC, EVC2, EYS, F9, FAH, FAM161A, FANCA, FANCC, FANCG, FH, FKRP, FKTN, G6PC, GAA, GALC, GALK1, GALT, GAMT, GBA, GBE1, GCDH, GFM1, GJB1, GJB2, GLA, GLB1, GLDC, GLE1, GNE, GNPTAB, GNPTG, GNS, GRHPR, HADHA, HAX1, HBA1, HBA2, HBB, HEXA, HEXB, HGSNAT, HLCS, HMGCL, HOGA1, HPS1, HPS3, HSD17B4, HSD3B2, HYAL1, HYLS1, IDS, IDUA, IKBKAP, IL2RG, IVD, KCNJ11, LAMA2, LAMA3, LAMB3, LAMC2, LCA5, LDLR, LDLRAP1, LHX3, LIFR, LIPA, LOXHD1, LPL, LRPPRC, MAN2B1, MCOLN1, MED17, MESP2, MFSD8, MKS1, MLC1, MMAA, MMAB, MMACHC, MMADHC, MPI, MPL, MPV17, MTHFR, MTM1, MTRR, MTTP, MUT, MYO7A, NAGLU, NAGS, NBN, NDRG1, NDUFAF5, NDUFS6, NEB, NPC1, NPC2, NPHS1, NPHS2, NR2E3, NTRK1, OAT, OPA3, OTC, PAH, PC, PCCA, PCCB, PCDH15, PDHA1, PDHB, PEX1, PEX10, PEX12, PEX2, PEX6, PEX7, PFKM, PHGDH, PKHD1, PMM2, POMGNT1, PPT1, PROP1, PRPS1, PSAP, PTS, PUS1, PYGM, RAB23, RAG2, RAPSN, RARS2, RDH12, RMRP, RPE65, RPGRIP1L, RS1, RTEL1, SACS, SAMHD1, SEPSECS, SGCA, SGCB, SGCG, SGSH, SLC12A3, SLC12A6, SLC17A5, SLC22A5, SLC25A13, SLC25A15, SLC26A2, SLC26A4, SLC35A3, SLC37A4, SLC39A4, SLC4A11, SLC6A8, SLC7A7, SMARCAL1, SMPD1, STAR, SUMF1, TAT, TCIRG1, TECPR2, TFR2, TGM1, TH, TMEM216, TPP1, TRMU, TSFM, TTPA, TYMP, USH1C, USH2A, VPS13A, VPS13B, VPS45, VRK1, VSX2, WNT10A, XPA, XPC, and ZFYVE26.

[0303] The sample used for phenotyping testing may comprise at least one target nucleic acid that can bind to a guide nucleic acid of the reagents described herein. The target nucleic acid, in some cases, is a nucleic acid encoding a sequence associated with a phenotypic trait.

[0304] The sample used for genotyping testing may comprise at least one target nucleic acid that can bind to a guide nucleic acid of the reagents described herein. The target nucleic acid, in some cases, is a nucleic acid encoding a sequence associated with a genotype of interest.

[0305] The sample used for ancestral testing may comprise at least one target nucleic acid that can bind to a guide nucleic acid of the reagents described herein. The target nucleic acid, in some cases, is a nucleic acid encoding a sequence associated with a geographic region of origin or ethnic group.

[0306] The sample can be used for identifying a disease status. For example, a sample is any sample described herein, and is obtained from a subject for use in identifying a disease status of a subject. The disease can be a cancer or genetic disorder. Sometimes, a method comprises obtaining a serum sample from a subject; and identifying a disease status of the subject. Often, the disease status is prostate disease status, but the status of any disease can be assessed.

[0307] In some instances, the target nucleic acid is a single stranded nucleic acid. Alternatively, or in combination, the target nucleic acid is a double stranded nucleic acid and is prepared into single stranded nucleic acids before or upon contacting the reagents. The target nucleic acid may be a reverse transcribed RNA, DNA, DNA amplicon, synthetic nucleic acids, or nucleic acids found in biological or environmental samples. The target nucleic acids include but are not limited to mRNA, rRNA, tRNA, non-coding RNA, long non-coding RNA, and microRNA (miRNA). In some cases, the target nucleic acid is single-stranded DNA (ssDNA) or mRNA. In some cases, the target nucleic acid is from a virus, a parasite, or a bacterium described herein. In some cases, the target nucleic acid is transcribed from a gene as described herein and then reverse transcribed into a DNA amplicon. In some cases, miRNA is extracted using a mirVANA kit. In some cases, RNA may be treated with shrimp alkaline phosphatase to remove phosphates from the 5′ and 3′ ends of an RNA for analysis. RNA analysis may further comprise the use of a thermocycler, SR Adaptors for Illumina, ligation enzymes, reverse transcriptase, and suitable primers for polymerase chain reaction.

[0308] A number of target nucleic acids are consistent with the methods and compositions disclosed herein. Some methods described herein can detect a target nucleic acid present in the sample in various concentrations or amounts as a target nucleic acid population. In some cases, the sample has at least 2 target nucleic acids. In some cases, the sample has at least 3, 5, 10, 20, 30, 40, 50, 100, 200, 300, 400, 500, 600, 700, 800, 900, 1000, 2000, 3000, 4000, 5000, 6000, 7000, 8000, 9000, or 10000 target nucleic acids. In some cases, the sample as from 1 to 10,000, from 100 to 8000, from 400 to 6000, from 500 to 5000, from 1000 to 4000, or from 2000 to 3000 target nucleic acids. In some cases, the method detects target nucleic acid present at least at one copy per 10 non-target nucleic acids, 10² non-target nucleic acids, 10³ non-target nucleic acids, 10⁴ non-target nucleic acids, 10⁵ non-target nucleic acids, 10⁶ non-target nucleic acids, 10⁷ non-target nucleic acids, 10⁸ non-target nucleic acids, 10⁹ non-target nucleic acids, or 10¹⁰ non-target nucleic acids. Often, the target nucleic acid can be from 0.05% to 20% of total nucleic acids in the sample. Sometimes, the target nucleic acid is from 0.1% to 10% of the total nucleic acids in the sample. The target nucleic acid, in some cases, is from 0.1% to 5% of the total nucleic acids in the sample. The target nucleic acid can also be from 0.1% to 1% of the total nucleic acids in the sample. The target nucleic acid can be DNA or RNA. The target nucleic acid can be any amount less than 100% of the total nucleic acids in the sample. The target nucleic acid can be 100% of the total nucleic acids in the sample.

[0309] In some embodiments, the sample comprises a target nucleic acid at a concentration of less than 1 nM, less than 2 nM, less than 3 nM, less than 4 nM, less than 5 nM, less than 6 nM, less than 7 nM, less than 8 nM, less than 9 nM, less than 10 nM, less than 20 nM, less than 30 nM, less than 40 nM, less than 50 nM, less than 60 nM, less than 70 nM, less than 80 nM, less than 90 nM, less than 100 nM, less than 200 nM, less than 300 nM, less than 400 nM, less than 500 nM, less than 600 nM, less than 700 nM, less than 800 nM, less than 900 nM, less than 1 μM, less than 2 μM, less than 3 μM, less than 4 μM, less than 5 μM, less than 6 μM, less than 7 μM, less than 8 μM, less than 9 μM, less than 10 μM, less than 100 μM, or less than 1 mM. In some embodiments, the sample comprises a target nucleic acid sequence at a concentration of from 1 nM to 2 nM, from 2 nM to 3 nM, from 3 nM to 4 nM, from 4 nM to 5 nM, from 5 nM to 6 nM, from 6 nM to 7 nM, from 7 nM to 8 nM, from 8 nM to 9 nM, from 9 nM to 10 nM, from 10 nM to 20 nM, from 20 nM to 30 nM, from 30 nM to 40 nM, from 40 nM to 50 nM, from 50 nM to 60 nM, from 60 nM to 70 nM, from 70 nM to 80 nM, from 80 nM to 90 nM, from 90 nM to 100 nM, from 100 nM to 200 nM, from 200 nM to 300 nM, from 300 nM to 400 nM, from 400 nM to 500 nM, from 500 nM to 600 nM, from 600 nM to 700 nM, from 700 nM to 800 nM, from 800 nM to 900 nM, from 900 nM to 1 μM, from 1 μM to 2 μM, from 2 μM to 3 μM, from 3 μM to 4 μM, from 4 μM to 5 μM, from 5 μM to 6 μM, from 6 μM to 7 μM, from 7 μM to 8 μM, from 8 μM to 9 μM, from 9 μM to 10 μM, from 10 μM to 100 μM, from 100 μM to 1 mM, from 1 nM to 10 nM, from 1 nM to 100 nM, from 1 nM to 1 μM, from 1 nM to 10 μM, from 1 nM to 100 μM, from 1 nM to 1 mM, from 10 nM to 100 nM, from 10 nM to 1 μM, from 10 nM to 10 μM, from 10 nM to 100 μM, from 10 nM to 1 mM, from 100 nM to 1 μM, from 100 nM to 10 μM, from 100 nM to 100 μM, from 100 nM to 1 mM, from 1 μM to 10 μM, from 1 μM to 100 μM, from 1 μM to 1 mM, from 10 μM to 100 μM, from 10 μM to 1 mM, or from 100 μM to 1 mM. In some embodiments, the sample comprises a target nucleic acid at a concentration of from 20 nM to 200 μM, from 50 nM to 100 μM, from 200 nM to 50 μM, from 500 nM to 20 μM, or from 2 μM to 10 μM. In some embodiments, the target nucleic acid is not present in the sample.

[0310] In some embodiments, the sample comprises fewer than 10 copies, fewer than 100 copies, fewer than 1000 copies, fewer than 10,000 copies, fewer than 100,000 copies, or fewer than 1,000,000 copies of a target nucleic acid sequence. In some embodiments, the sample comprises from 10 copies to 100 copies, from 100 copies to 1000 copies, from 1000 copies to 10,000 copies, from 10,000 copies to 100,000 copies, from 100,000 copies to 1,000,000 copies, from 10 copies to 1000 copies, from 10 copies to 10,000 copies, from 10 copies to 100,000 copies, from 10 copies to 1,000,000 copies, from 100 copies to 10,000 copies, from 100 copies to 100,000 copies, from 100 copies to 1,000,000 copies, from 1,000 copies to 100,000 copies, or from 1,000 copies to 1,000,000 copies of a target nucleic acid sequence. In some embodiments, the sample comprises from 10 copies to 500,000 copies, from 200 copies to 200,000 copies, from 500 copies to 100,000 copies, from 1000 copies to 50,000 copies, from 2000 copies to 20,000 copies, from 3000 copies to 10,000 copies, or from 4000 copies to 8000 copies. In some embodiments, the target nucleic acid is not present in the sample.

[0311] A number of target nucleic acid populations are consistent with the methods and compositions disclosed herein. Some methods described herein can detect two or more target nucleic acid populations present in the sample in various concentrations or amounts. In some cases, the sample has at least 2 target nucleic acid populations. In some cases, the sample has at least 3, 4, 5, 6, 7, 8, 9, 10, 20, 30, 40, or 50 target nucleic acid populations. In some cases, the sample has from 3 to 50, from 5 to 40, or from 10 to 25 target nucleic acid populations. In some cases, the method detects target nucleic acid populations that are present at least at one copy per 10¹ non-target nucleic acids, 10² non-target nucleic acids, 10³ non-target nucleic acids, 10⁴ non-target nucleic acids, 10⁵ non-target nucleic acids, 10⁶ non-target nucleic acids, 10⁷ non-target nucleic acids, 10⁸ non-target nucleic acids, 10⁹ non-target nucleic acids, or 10¹⁰ non-target nucleic acids. The target nucleic acid populations can be present at different concentrations or amounts in the sample.

[0312] In some embodiments, the target nucleic acid as disclosed herein can activate the programmable nuclease to initiate sequence-independent cleavage of a nucleic acid-based reporter (e.g., a reporter comprising a DNA sequence, a reporter comprising an RNA sequence, or a reporter comprising DNA and RNA). For example, a programmable nuclease of the present disclosure is activated by a target DNA to cleave reporters having an RNA (also referred to herein as an “RNA reporter”). Alternatively, a programmable nuclease of the present disclosure is activated by a target RNA to cleave reporters having an RNA. Alternatively, a programmable nuclease of the present disclosure is activated by a target DNA to cleave reporters having a DNA (also referred to herein as a “DNA reporter”). The RNA reporter can comprise a single-stranded RNA labelled with a detection moiety or can be any RNA reporter as disclosed herein. The DNA reporter can comprise a single-stranded DNA labelled with a detection moiety or can be any DNA reporter as disclosed herein.

[0313] In some embodiments, the target nucleic acid as described in the methods herein does not initially comprise a PAM sequence. However, any target nucleic acid of interest may be generated using the methods described herein to comprise a PAM sequence, and thus be a PAM target nucleic acid. A PAM target nucleic acid, as used herein, refers to a target nucleic acid that has been amplified to insert a PAM sequence that is recognized by a CRISPR/Cas system.

[0314] In some embodiments, the target nucleic acid is in a cell. In some embodiments, the cell is a single-cell eukaryotic organism; a plant cell an algal cell; a fungal cell; an animal cell; a cell from an invertebrate animal; a cell from a vertebrate animal such as fish, amphibian, reptile, bird, and mammal; or a cell from a mammal such as a human, a non-human primate, an ungulate, a feline, a bovine, an ovine, and a caprine. In preferred embodiments, the cell is a eukaryotic cell. In preferred embodiments, the cell is a mammalian cell, a human cell, or a plant cell.

[0315] Any of the above disclosed samples are consistent with the methods, compositions, reagents, enzymes, and kits disclosed herein and can be used as a companion diagnostic with any of the diseases disclosed herein, or can be used in reagent kits, point-of-care diagnostics, or over-the-counter diagnostics.

### Methods of Modifying or Editing a Target Nucleic Acid Sequence

[0316] The disclosure provides compositions and methods for modifying or editing a target nucleic acid sequence. In some embodiments, the target nucleic acid sequence is associated with (e.g., causes, at least in part) a disease or disorder described herein, including a liver disease or disorder, an eye disease or disorder, cystic fibrosis, or a muscle disease or disorder. In some examples, the target nucleic acid comprises at least a portion of any one of the following genes: DNMT1, HPRT1, RPL32P3, CCR5, FANCF, GRIN2B, EMX1, AAVS1, ALKBH5, CLTA, CDK11, CTNNB1, AXIN1, LRP6, TBK1, BAP1, TLE3, PPM1A, BCL2L2, SUFU, RICTOR, VPS35, TOP1, SIRT1, PTEN, MMD, PAQR8, H2AX, POU5F1, OCT4, SYS1, ARFRP1, TSPAN14, EMC2, EMC3, SEL1L, DERL2, UBE2G2, UBE2J1, HRD1, PCSK9, BAK1 and CFTR. In some embodiments, the target nucleic acid comprises at least a portion of a PCSK9 gene. In some embodiments, the PCSK9 gene comprises a mutation associated with a liver disease or disorder. In some embodiments, the target nucleic acid comprises at least a portion of a BAK1 gene. In some embodiments, the BAK1 gene comprises a mutation associated with an eye disease or disorder. In some embodiments, the target nucleic acid comprises at least a portion of a CFTR gene. In some embodiments, the CFTR gene comprises a mutation associated with cystic fibrosis. In some embodiments, the CFTR gene comprises a delta F508 mutation. Compositions and methods of the disclosure can be used for introducing a site-specific cleavage in a target nucleic acid sequence. The site-specific cleavage can be a double-strand cleavage. The site-specific cleavage can be a single-strand cleavage (e.g. nicking). The modification can result in introducing a mutation (e.g., point mutations, deletions) in a target nucleic acid. The modification can result in removing a disease-causing mutation in a nucleic acid sequence. Methods of the disclosure can be targeted to any locus in a genome of a cell. They can generate point mutations, deletions, null mutations, or tissue-specific mutations in a target nucleic acid sequence. A complex comprising a programmable nuclease and guide nucleic acid of the disclosure can be used to generate gene knock-out, gene knock-in, gene editing, gene tagging, or a combination thereof. In some embodiments, the activity of a nuclease, such as a cleavage product, may be analyzed using gel electrophoresis or nucleic acid sequencing.

[0317] The methods described herein (e.g., methods of introducing a nick or a double-stranded break into a target nucleic acid) may be used to edit or modify a target nucleic acid. Methods of modifying a target nucleic acid may use the compositions comprising a programmable nuclease and a gRNA as described herein. Modifying a target nucleic acid may comprise one or more of cleaving the target nucleic acid, deleting one or more nucleotides of the target nucleic acid, inserting one or more nucleotides into the target nucleic acid, mutating one or more nucleotides of the target nucleic acid, or modifying (e.g., methylating, demethylating, deaminating, or oxidizing) of one or more nucleotides of the target nucleic acid.

[0318] In some embodiments, modifying a target nucleic acid comprises genome editing. Genome editing may comprise modifying a genome, chromosome, plasmid, or other genetic material of a cell or organism. In some embodiments the genome, chromosome, plasmid, or other genetic material of the cell or organism is modified in vivo. In some embodiments the genome, chromosome, plasmid, or other genetic material of the cell or organism is modified in a cell. In some embodiments the genome, chromosome, plasmid, or other genetic material of the cell or organism is modified in vitro. For example, a plasmid may be modified in vitro using a composition described herein and introduced into a cell or organism. In some embodiments, modifying a target nucleic acid may comprise deleting a sequence from a target nucleic acid. For example, a mutated sequence or a sequence associated with a disease may be removed from a target nucleic acid. In some embodiments, modifying a target nucleic acid may comprise replacing a sequence in a target nucleic acid with a second sequence. For example, a mutated sequence or a sequence associated with a disease may be replaced with a second sequence lacking the mutation or that is not associated with the disease. In some embodiments, modifying a target nucleic acid may comprise introducing a sequence into a target nucleic acid. For example, a beneficial sequence or a sequence that may reduce or eliminate a disease may inserted into the target nucleic acid.

[0319] In some embodiments, the present disclosure provides methods and compositions for editing a target nucleic acid sequence comprising a programmable nuclease capable of introducing a double-strand break in a double stranded DNA (dsDNA) target sequence. The programmable nuclease can be coupled to a guide nucleic acid that targets a particular region of interest in the dsDNA. A double-strand break can be repaired and rejoined by non-homologous end joining (NHEJ) or homology directed repair (HDR). Thus, a programmable nuclease capable of introducing a double-strand break as disclosed herein can be useful in a genome editing method, for example, used for therapeutic applications to treat a disease or disorder, or for agricultural applications. Such diseases or disorders that can be treated by the methods and compositions described herein include a liver disease or disorder, an eye disease or disorder, cystic fibrosis, or a muscle disease or disorder. CasΦ programmable nuclease disclosed herein can be used for genome editing purposes to generate double strand breaks in order to excise a region of DNA and subsequently introduce a region of DNA (e.g., donor DNA) into the excised region.

[0320] In some embodiments, the present disclosure provides methods and compositions for modifying or editing a target nucleic acid sequence comprising two or more programmable nickases. For example, modifying a target nucleic acid may comprise introducing a two or more single-stranded breaks in the target nucleic acid. In some embodiments, a break may be introduced by contacting a target nucleic acid with a programmable nickase and a guide nucleic acid. The guide nucleic acid may bind to the programmable nickase and hybridize to a region of the target nucleic acid, thereby recruiting the programmable nickase to the region of the target nucleic acid. Binding of the programmable nickase to the guide nucleic acid and the region of the target nucleic acid may activate the programmable nickase, and the programmable nickase may introduce a break (e.g., a single stranded break) in the region of the target nucleic acid. In some embodiments, modifying a target nucleic acid may comprise introducing a first break in a first region of the target nucleic acid and a second break in a second region of the target nucleic acid. For example, modifying a target nucleic acid may comprise contacting a target nucleic acid with a first guide nucleic acid that binds to a first programmable nickase and hybridizes to a first region of the target nucleic acid and a second guide nucleic acid that binds to a second programmable nickase and hybridizes to a second region of the target nucleic acid. The first programmable nickase may introduce a first break in a first strand at the first region of the target nucleic acid, and the second programmable nickase may introduce a second break in a second strand at the second region of the target nucleic acid. In some embodiments, a segment of the target nucleic acid between the first break and the second break may be removed, thereby modifying the target nucleic acid. In some embodiments, a segment of the target nucleic acid between the first break and the second break may be replaced (e.g., with an insert sequence), thereby modifying the target nucleic acid.

[0321] The methods of the disclosure can use HDR or NHEJ. Following cleavage of a targeted genomic sequence, one of two alternative DNA repair mechanisms can restore chromosomal integrity: non-homologous end joining (NHEJ) which can generate insertions and/or deletions of a few base-pairs of DNA at the cut site. Alternatively, the cell can employ homology-directed repair (HDR), which can correct the lesion via an additional DNA template (e.g., donor) that spans the cut site. In some instances, the methods of the disclosure use microhomology-mediated end-joining (MMEJ).

[0322] Methods and compositions of the disclosure can be used to insert a donor polynucleotide into a target nucleic acid sequence. A donor polynucleotide can comprise a segment of nucleic acid to be integrated at a target genomic locus. The donor polynucleotide can comprise one or more polynucleotides of interest. The donor polynucleotide can comprise one or more expression cassettes. The expression cassette can comprise a donor polynucleotide of interest, a polynucleotide encoding a selection marker and/or a reporter gene, and regulatory components that influence expression.

[0323] The donor polynucleotide can comprise a genomic nucleic acid. The genomic nucleic acid can be derived from an animal, a mouse, a human, a non-human, a rodent, a non-human, a rat, a hamster, a rabbit, a pig, a bovine, a deer, a sheep, a goat, a chicken, a cat, a dog, a ferret, a primate (e.g., marmoset, rhesus monkey), domesticated mammal or an agricultural mammal, an avian, a bacterium, a archaeon, a virus, or any other organism of interest or a combination thereof. The donor polynucleotide may be synthetic.

[0324] Donor polynucleotides of any suitable size can be integrated into a genome. In some embodiments, the donor polynucleotide integrated into a genome is less than 3, about 3, 3.5, 4, 4.5, 5, 5.5, 6, 6.5, 7, 7.5, 8, 8.5, 9, 9.5, 10, 10.5, 11, 11.5, 12, 12.5, 13, 13.5, 14, 14.5, 15, 16, 17, 18, 19, 20, 25, 30, 35, 40, 45, 50, 100, 150, 200, 250, 300, 350, 400, 450, 500 or more than 500 kilobases (kb) in length. In some embodiments, the donor polynucleotide integrated into a genome is at least about 2, 2.5, 3, 3.5, 4, 4.5, 5, 5.5, 6, 6.5, 7, 7.5, 8, 8.5, 9, 9.5, 10, 10.5, 11, 11.5, 12, 12.5, 13, 13.5, 14, 14.5, 15, 16, 17, 18, 19, 20, 25, 30, 35, 40, 45, 50, 100, 150, 200, 250, 300, 350, 400, 450, 500 or more than 500 kb in length. In some embodiments, the donor polynucleotide integrated into a genome is up to about 3, 3.5, 4, 4.5, 5, 5.5, 6, 6.5, 7, 7.5, 8, 8.5, 9, 9.5, 10, 10.5, 11, 11.5, 12, 12.5, 13, 13.5, 14, 14.5, 15, 16, 17, 18, 19, 20, 25, 30, 35, 40, 45, 50, 100, 150, 200, 250, 300, 350, 400, 450, 500 or more than 500 kb in length.

[0325] The donor polynucleotide can be flanked by site-specific recombination target sequences (e.g., 5′ and 3′ homology arms) on a targeting vector. The length of a homology arm may be from about 50 to about 1000 bp. The length of a homology arm may be from about 400 to about 1000 bp. A homology arm can be of any length that is sufficient to promote a homologous recombination event with a corresponding target site, including for example, from about 400 bp to about 500 bp, from about 500 bp to about 600 bp, from about 600 bp to about 700 bp, from about 700 bp to about 800 bp, from about 800 bp to about 900 bp, or from about 900 bp to about 1000 bp. In preferred embodiments, the length of a homology arm may be from about 200 to about 300 bp. The sum total of 5′ and 3′ homology arms can be about 0.5 kb, 1 kb, 1.5 kb, 2 kb, 3 kb, 4 kb, 5 kb, 6 kb, 7 kb, 8 kb, 9 kb, about 0.5 kb to about 1 kb, about 1 kb to about 1.5 kb, about 1.5 kb to about 2 kb, about 2 kb to about 3 kb, about 3 kb to about 4 kb, about 4 kb to about 5 kb, about 5 kb to about 6 kb, about 6 kb to about 7 kb, about 8 kb to about 9 kb, or is at least 10 kb.

[0326] In some embodiments, the donor polynucleotide comprises one or more phosphorothioate bonds between nucleobases. In some embodiments, one or more of the first five 5′ nucleobases of the donor polynucleotide are linked by phosphorothioate bonds. In some embodiments, one or more of the five nucleobases at the 3′ end of the donor polynucleotide are linked by phosphorothioate bonds. In some embodiments, one or more of the first three 5′ nucleobases of the donor polynucleotide are linked by phosphorothioate bonds. In some embodiments, one or more of the three nucleobases at the 3′ end of the donor polynucleotide are linked by phosphorothioate bonds. In preferred embodiments, the two nucleobases at 5′ end of the donor polynucleotide are linked by a phosphorothioate bond. In some embodiments, the two nucleobases at the 3′ end of the donor polynucleotide are linked by a phosphorothioate bond. In more preferred embodiments, the two nucleobases at 5′ end of the donor polynucleotide are linked by a phosphorothioate bond and the two nucleobases at the 3′ end of the donor polynucleotide are linked by a phosphorothioate bond.

[0327] Examples of site-specific recombinases that can be used include, but are not limited to, Cre, Flp, and Dre recombinases. The site-specific recombinase can be introduced into the cell by any means, including by introducing the recombinase polypeptide into the cell or by introducing a polynucleotide encoding the site-specific recombinase into the host cell. The polynucleotide encoding the site-specific recombinase can be located within the insert polynucleotide or within a separate polynucleotide. The site-specific recombinase can be operably linked to a promoter active in the cell including, for example, an inducible promoter, a promoter that is endogenous to the cell, a promoter that is heterologous to the cell, a cell-specific promoter, a tissue-specific promoter, or a developmental stage-specific promoter. Site-specific recombination target sequences which can flank the insert polynucleotide or any polynucleotide of interest in the insert polynucleotide can include, but are not limited to, 1oxP, 1ox511, 1oχ2272, 1oχ66, 1ox71, 1oxM2, 1ox5171, FRT, FRT11, FRT71, attp, att, FRT, rox, and a combination thereof.

[0328] The target nucleic acid may comprise one or more of a genome, a chromosome, a plasmid, a gene, a promoter, an untranslated region, an open reading frame, an intron, an exon, or an operator. The target nucleic acid may comprise a segment of one or more of a genome, a chromosome, a plasmid, a gene, a promoter, an untranslated region, an open reading frame, an intron, an exon, or an operator. In some embodiments, the target nucleic acid may be part of a cell or an organism. In some embodiments, the target nucleic acid may be a cell-free genetic component.

[0329] In some embodiments, gene modifying or gene editing is achieved by fusing a programmable nuclease such as a CasΦ protein to a heterologous sequence. The heterologous sequence can be a suitable fusion partner, e.g., a polypeptide that provides recombinase activity by acting on the target nucleic acid sequence. In some embodiments, the fusion protein comprises a programmable nuclease such as a CasΦ protein fused to a heterologous sequence by a linker.

[0330] The heterologous sequence or fusion partner can be a site specific recombinase. The site specific recombinase can have recombinase activity. Examples of site-specific recombinases that can be used include, but are not limited to, Cre, Hin, Tre, and FLP recombinases. The heterologous sequence or fusion partner can be a recombinase catalytic domain. The recombinase catalytic domains can be from, for example, a tyrosine recombinase, a serine recombinase, a Gin recombinase, a Hin recombinase, a β recombinase, a Sin recombinase, a Tn3 recombinase, a γδ recombinase, a Cre recombinase, a FLP recombinase, or a phC31 integrase.

[0331] The heterologous sequence or fusion partner can be fused to the C-terminus, N-terminus, or an internal portion (e.g., a portion other than the N- or C-terminus) of the programmable nuclease, for example a dead CasΦ polypeptide.

[0332] The heterologous sequence or fusion partner can be fused to the programmable nuclease by a linker. A linker can be a peptide linker or a non-peptide linker. In some embodiments, the linker is an XTEN linker. In some embodiments, the linker comprises one or more repeats a tri-peptide GGS. In some embodiments, the linker is from 1 to 100 amino acids in length. In some embodiments, the linker is more 100 amino acids in length. In some embodiments, the linker is from 10 to 27 amino acids in length. A non-peptide linker can be a polyethylene glycol (PEG), polypropylene glycol (PPG), co-poly(ethylene/propylene) glycol, polyoxyethylene (POE), polyurethane, polyphosphazene, polysaccharides, dextran, polyvinyl alcohol, polyvinylpyrrolidones, polyvinyl ethyl ether, polyacryl amide, polyacrylate, polycyanoacrylates, lipid polymers, chitins, hyaluronic acid, heparin, or an alkyl linker.

[0333] In some embodiments, the CasΦ protein can comprise an enzymatically inactive and/or “dead” (abbreviated by “d”) programmable nuclease in combination (e.g., fusion) with a polypeptide comprising recombinase activity. Although a programmable CasΦ nuclease normally has nuclease activity, in some embodiments, a programmable CasΦ nuclease does not have nuclease activity.

[0334] A programmable nuclease can comprise a modified form of a wild type counterpart. The modified form of the wild type counterpart can comprise an amino acid change (e.g., deletion, insertion, or substitution) that reduces the nucleic acid-cleaving activity of the programmable nuclease. For example, a nuclease domain (e.g., RuvC domain) of a CasΦ polypeptide can be deleted or mutated so that it is no longer functional or comprises reduced nuclease activity. The modified form of the programmable nuclease can have less than 90%, less than 80%, less than 70%, less than 60%, less than 50%, less than 40%, less than 30%, less than 20%, less than 10%, less than 5%, or less than 1% of the nucleic acid-cleaving activity of the wild-type counterpart. The modified form of a programmable nuclease can have no substantial nucleic acid-cleaving activity. When a programmable nuclease is a modified form that has no substantial nucleic acid-cleaving activity, it can be referred to as enzymatically inactive and/or dead. A dead CasΦ polypeptide (e.g., dCasΦ) can bind to a target nucleic acid sequence but may not cleave the target nucleic acid sequence. A dCasΦ polypeptide can associate with a guide nucleic acid to activate or repress transcription of a target nucleic acid sequence.

[0335] In some embodiments, a programmable nuclease is a dead CasΦ polypeptide. A dead CasΦ polypeptide can comprise at least 70%, at least 75%, at least 80%, at least 85%, at least 90%, at least 92%, at least 95%, at least 97%, at least 99%, or 100% sequence identity with any one of SEQ ID NO: 1-SEQ ID NO: 47, SEQ ID NO. 105, and SEQ ID NO 107. In some embodiments, a programmable nuclease is a dead CasΦ polypeptide comprising at least 85% sequence identity to any one of SEQ ID NO: 1-SEQ ID NO: 47, SEQ ID NO. 105, and SEQ ID NO 107. In some embodiments, a programmable nuclease is a dead CasΦ polypeptide comprising at least 90% sequence identity to any one of SEQ ID NO: 1-SEQ ID NO: 47, SEQ ID NO. 105, and SEQ ID NO 107. In some embodiments, a programmable nuclease is a dead CasΦ polypeptide comprising at least 95% sequence identity to any one of SEQ ID NO: 1-SEQ ID NO: 47, SEQ ID NO. 105, and SEQ ID NO 107. In some embodiments, a programmable nuclease is a dead CasΦ polypeptide comprising at least 98% sequence identity to any one of SEQ ID NO: 1-SEQ ID NO: 47, SEQ ID NO. 105, and SEQ ID NO 107.

[0336] A deadCasΦ (also referred to herein as “dCasΦ”) polypeptide can form a ribonucleoprotein complex with a guide nucleic acid. The guide nucleic acid can comprise a crRNA sequence comprising at least 70%, at least 80%, at least 90%, at least 92%, at least 95%, at least 97%, or at least 99%, or 100% sequence identity to any one of SEQ ID NO: 48-SEQ ID NO: 86, or a reverse complement thereof.

[0337] Enzymatically inactive can refer to a polypeptide that can bind to a nucleic acid sequence in a polynucleotide in a sequence-specific manner, but may not cleave a target polynucleotide. An enzymatically inactive site-directed polypeptide can comprise an enzymatically inactive domain (e.g. a programmable nuclease domain). Enzymatically inactive can refer to no activity. Enzymatically inactive can refer to substantially no activity. Enzymatically inactive can refer to essentially no activity. Enzymatically inactive can refer to an activity less than 1%, less than 2%, less than 3%, less than 4%, less than 5%, less than 6%, less than 7%, less than 8%, less than 9%, or less than 10% activity compared to a wild-type exemplary activity (e.g., nucleic acid cleaving activity, wild-type CasΦ activity).

[0338] In further embodiments, methods of modifying cells are provided. In some embodiments, a method of modifying a cell comprising a target nucleic acid wherein the method comprises introducing a programmable CasΦ nuclease or variant thereof disclosed herein to the cell, wherein the programmable CasΦ nuclease or variant cleaves or modifies the target nucleic acid.

[0339] Modified cells obtained or obtainable by the methods described herein are provided. In some embodiments, a modified cell is obtained or is obtained by a method of modifying a cell disclosed herein.

[0340] In some embodiments, a CasΦ polypeptide disclosed herein is expressed in a cell. In some embodiments, a CasΦ polypeptide disclosed herein complexed with a guide nucleic is expressed in a cell. In some embodiments, a method disclosed herein comprises modifying or editing a cell. In some embodiments, a modified cell is provided wherein a cell is modified by a CasΦ polypeptide disclosed herein. In some embodiments, a cell is provided wherein the cell comprises a CasΦ polypeptide disclosed herein.

### Methods of Nicking of a Target Nucleic Acid

[0341] Disclosed herein are methods of introducing a break into a target nucleic acid. In some embodiments, the break may be a single stranded break (e.g., a nick). The programmable nickases disclosed herein and a gRNA disclosed herein may be used to introduce a single-stranded break into a target nucleic acid, for example a single stranded break in a double-stranded DNA.

[0342] A method of introducing a break into a target nucleic acid may comprise contacting the target nucleic acid with a first guide nucleic acid (e.g., a guide nucleic acid comprising a region that binds to a first programmable nickase) and a second guide nucleic acid (e.g., a guide nucleic acid comprising a region that binds to a second programmable nickase). The first guide nucleic acid may comprise an additional region that binds to the target nucleic acid, and the second guide nucleic acid may comprise an additional region that binds to the target nucleic acid. The additional region of the first guide nucleic acid and the additional region of the second guide nucleic acid may bind opposing strands of the target nucleic acid.

[0343] In some embodiments, a programmable nickase of the disclosure can cleave a non-target strand of a double-stranded target nucleic acid (e.g., DNA). In some embodiments, the programmable nickase may not cleave the target strand of the double-stranded target nucleic acid (e.g., DNA). The strand of a double-stranded target nucleic acid that is complementary to and hybridizes with the guide nucleic acid can be called the target strand. The strand of the double-stranded target DNA that is complementary to the target strand, and therefore is not complementary to the guide nucleic acid can be called non-target strand.

[0344] The temperature at which a ribonucleoprotein (RNP) complex comprising a programmable nuclease and a guide nucleic acid is formed (i.e. the RNP complexing temperature) can affect the nickase activity of the programmable nuclease. For example, an RNP complex formed at room temperature can have a greater nickase activity than an RNP complex formed at 37° C. In some cases, the RNP complex can be formed at room temperature, for example, from about 20° C. to 22° C. In some cases, the RNP complex can be formed at, for example, about 15° C., about 16° C., about 17° C., about 18° C., about 19° C., about 20° C., about 21° C., about 22° C., about 23° C., about 24° C., or about 25° C.

[0345] In some embodiments, a programmable nuclease may exhibit at least about 1.1-fold, at least about 1.2-fold, at least about 1.3-fold, at least about 1.4-fold, at least about 1.5-fold, at least about 1.6-fold, at least about 1.7-fold, at least about 1.8-fold, at least about 1.9-fold, at least about 2-fold, at least about 2.1-fold, at least about 2.2-fold, at least about 2.3-fold, at least about 2.4-fold, at least about 2.5-fold, at least about 2.6-fold, at least about 2.7-fold, at least about 2.8-fold, at least about 2.9-fold, at least about 3-fold, at least about 3.5-fold, at least about 4-fold, at least about 4.5-fold, at least about 5-fold, at least about 5.5-fold, at least about 6-fold, at least about 7-fold, at least about 8-fold, at least about 9-fold, at least about 10-fold, at least about 15-fold, at least about 20-fold, at least about 30-fold, at least about 40-fold, or at least about 50-fold greater nicking activity when complexed with a guide RNA at room temperature as compared to when complexed at 37° C.

[0346] The crRNA repeat sequence of a guide nucleic acid can affect the nickase activity of a programmable nuclease. For example, a programmable nuclease can comprise enhanced or greater nickase activity when complexed with guide nucleic acids comprising certain crRNA repeat sequences. For example, a programmable nuclease can comprise greater nickase activity when complexed with a guide RNA comprising a crRNA repeat sequence of CasΦ.18 as shown in TABLE 2. In another example, a programmable nuclease can comprise greater nickase activity when complexed with a guide RNA comprising a crRNA repeat sequence of CasΦ.7 as shown in TABLE 2. In some embodiments, a programmable nuclease may exhibit at least about 1.1-fold, at least about 1.2-fold, at least about 1.3-fold, at least about 1.4-fold, at least about 1.5-fold, at least about 1.6-fold, at least about 1.7-fold, at least about 1.8-fold, at least about 1.9-fold, at least about 2-fold, at least about 2.1-fold, at least about 2.2-fold, at least about 2.3-fold, at least about 2.4-fold, at least about 2.5-fold, at least about 2.6-fold, at least about 2.7-fold, at least about 2.8-fold, at least about 2.9-fold, at least about 3-fold, at least about 3.5-fold, at least about 4-fold, at least about 4.5-fold, at least about 5-fold, at least about 5.5-fold, at least about 6-fold, at least about 7-fold, at least about 8-fold, at least about 9-fold, at least about 10-fold, at least about 15-fold, at least about 20-fold, at least about 30-fold, at least about 40-fold, or at least about 50-fold greater nicking activity when complexed with a guide RNA comprising a specific crRNA repeat sequence as compared to when in a complex with a guide RNA comprising another crRNA repeat sequence.

[0347] The programmable nucleases disclosed herein may exhibit cis-cleavage activity or target cleavage activity. Target cleavage activity may refer to the cleavage of a target nucleic acid by the programmable nuclease. In some cases, the cis-cleavage activity results in double-stranded breaks in the target nucleic acids. In some cases, the cis-cleavage activity results in single-stranded breaks in the target nucleic acids. In some cases, the cis-cleavage activity produces a mixture of double- and single-stranded breaks in the target nucleic acids. In further cases, the rates of cis-cleavage double- and single-strand break formation may be dependent on the sequence of the guide nucleic acid. In some cases, the ratio of cis-cleavage double- and single-strand break formation may be dependent on the sequence of the guide nucleic acid. In some cases, the ratio or rate of cis-cleavage double- and single-strand break formation may be dependent on the repeat sequence of the crRNA of the guide nucleic acid. In some cases, the ratio or rate of cis-cleavage double- and single-strand break formation may be dependent on the temperature at which the ribonucleoprotein complex comprising the programmable nuclease and the guide nucleic acid are complexed.

[0348] A programmable nuclease for use in modifying a target nucleic acid may have greater nicking activity as compared to double stranded cleavage activity. In some embodiments, a programmable nuclease may exhibit at least about 1.1-fold, at least about 1.2-fold, at least about 1.3-fold, at least about 1.4-fold, at least about 1.5-fold, at least about 1.6-fold, at least about 1.7-fold, at least about 1.8-fold, at least about 1.9-fold, at least about 2-fold, at least about 2.1-fold, at least about 2.2-fold, at least about 2.3-fold, at least about 2.4-fold, at least about 2.5-fold, at least about 2.6-fold, at least about 2.7-fold, at least about 2.8-fold, at least about 2.9-fold, at least about 3-fold, at least about 3.5-fold, at least about 4-fold, at least about 4.5-fold, at least about 5-fold, at least about 5.5-fold, at least about 6-fold, at least about 7-fold, at least about 8-fold, at least about 9-fold, at least about 10-fold, at least about 15-fold, at least about 20-fold, at least about 30-fold, at least about 40-fold, or at least about 50-fold greater nicking activity as compared to double stranded cleavage activity.

[0349] In other cases, a programmable nuclease for use in modifying a target nucleic acid may have greater double stranded cleavage activity as compared to nicking activity. In some embodiments, a programmable nuclease may exhibit at least about 1.1-fold, at least about 1.2-fold, at least about 1.3-fold, at least about 1.4-fold, at least about 1.5-fold, at least about 1.6-fold, at least about 1.7-fold, at least about 1.8-fold, at least about 1.9-fold, at least about 2-fold, at least about 2.1-fold, at least about 2.2-fold, at least about 2.3-fold, at least about 2.4-fold, at least about 2.5-fold, at least about 2.6-fold, at least about 2.7-fold, at least about 2.8-fold, at least about 2.9-fold, at least about 3-fold, at least about 3.5-fold, at least about 4-fold, at least about 4.5-fold, at least about 5-fold, at least about 5.5-fold, at least about 6-fold, at least about 7-fold, at least about 8-fold, at least about 9-fold, at least about 10-fold, at least about 15-fold, at least about 20-fold, at least about 30-fold, at least about 40-fold, or at least about 50-fold greater double stranded cleavage activity as compared to nicking activity.

[0350] In some embodiments, the nicking activity and double stranded cleavage activity of a programmable nuclease depend on the conditions and species present in the sample containing the programmable nuclease. In some cases, the nicking activity and double stranded cleavage activity of the programmable nuclease are responsive to the sequence of the crRNA present in the guide nucleic acid. In some cases, the ratio of nicking activity and double stranded cleavage activity can be modulated by changing the sequence of the crRNA present. In some cases, the nicking activity and double stranded cleavage activity of the programmable nuclease respond differently to changes in temperature (e.g., RNP complexing temperature), pH, osmolarity, buffer, target nucleic acid concentration, ionic strength, and inhibitor concentration. In some embodiments, the ratio of nicking activity to cleavage activity by a programmable nuclease can be actively controlled by adjusting sample conditions and crRNA sequences.

### Methods of Regulating Gene Expression

[0351] In some embodiments, the disclosure provided methods and compositions for regulating gene expression. The methods and compositions can comprise use of an enzymatically inactive and/or “dead” (abbreviated by “d”) programmable nuclease in combination (e.g., fusion) with a polypeptide comprising transcriptional regulation activity. Although a programmable CasΦ nuclease normally has nuclease activity, in some embodiments, a programmable CasΦ nuclease does not have nuclease activity.

[0352] A programmable nuclease can comprise a modified form of a wild type counterpart. The modified form of the wild type counterpart can comprise an amino acid change (e.g., deletion, insertion, or substitution) that reduces the nucleic acid-cleaving activity of the programmable nuclease. For example, a nuclease domain (e.g., RuvC domain) of a CasΦ polypeptide can be deleted or mutated so that it is no longer functional or comprises reduced nuclease activity. The modified form of the programmable nuclease can have less than 90%, less than 80%, less than 70%, less than 60%, less than 50%, less than 40%, less than 30%, less than 20%, less than 10%, less than 5%, or less than 1% of the nucleic acid-cleaving activity of the wild-type counterpart. The modified form of a programmable nuclease can have no substantial nucleic acid-cleaving activity. When a programmable nuclease is a modified form that has no substantial nucleic acid-cleaving activity, it can be referred to as enzymatically inactive and/or dead. A dead CasΦ polypeptide (e.g., dCasΦ) can bind to a target nucleic acid sequence but may not cleave the target nucleic acid sequence. A dCasΦ polypeptide can associate with a guide nucleic acid to activate or repress transcription of a target nucleic acid sequence.

[0353] In some embodiments, the disclosure provides a method of selectively modulating transcription of a gene in a cell. The method can comprise introducing into a cell a (i) fusion polypeptide comprising a dCasΦ polypeptide and a polypeptide comprising transcriptional regulation activity, or a nucleic acid comprising a nucleotide sequence encoding the fusion polypeptide, wherein the dCasΦ polypeptide is enzymatically inactive or exhibits reduced nucleic acid cleavage activity; and ii) a guide nucleic acid, or a nucleic acid comprising a nucleotide sequence encoding the guide nucleic acid.

[0354] In some embodiments, a programmable nuclease is a dead CasΦ polypeptide. A dead CasΦ polypeptide can comprise at least 70%, at least 75%, at least 80%, at least 85%, at least 90%, at least 92%, at least 95%, at least 97%, at least 99%, or 100% sequence identity with any one of SEQ ID NO: 1-SEQ ID NO: 47, SEQ ID NO. 105, and SEQ ID NO 107. In some embodiments, a programmable nuclease is a dead CasΦ polypeptide comprising at least 85% sequence identity to any one of SEQ ID NO: 1-SEQ ID NO: 47, SEQ ID NO. 105, and SEQ ID NO 107. In some embodiments, a programmable nuclease is a dead CasΦ polypeptide comprising at least 90% sequence identity to any one of SEQ ID NO: 1-SEQ ID NO: 47, SEQ ID NO. 105, and SEQ ID NO 107. In some embodiments, a programmable nuclease is a dead CasΦ polypeptide comprising at least 95% sequence identity to any one of SEQ ID NO: 1-SEQ ID NO: 47, SEQ ID NO. 105, and SEQ ID NO 107. In some embodiments, a programmable nuclease is a dead CasΦ polypeptide comprising at least 98% sequence identity to any one of SEQ ID NO: 1-SEQ ID NO: 47, SEQ ID NO. 105, and SEQ ID NO 107.

[0355] A deadCasΦ (also referred to herein as “dCasΦ”) polypeptide can form a ribonucleoprotein complex with a guide nucleic acid. The guide nucleic acid can comprise a crRNA sequence comprising at least 70%, at least 80%, at least 90%, at least 92%, at least 95%, at least 97%, or at least 99%, or 100% sequence identity to any one of SEQ ID NO: 48-SEQ ID NO: 86, or a reverse complement thereof.

[0356] Enzymatically inactive can refer to a polypeptide that can bind to a nucleic acid sequence in a polynucleotide in a sequence-specific manner, but may not cleave a target polynucleotide. An enzymatically inactive site-directed polypeptide can comprise an enzymatically inactive domain (e.g. a programmable nuclease domain). Enzymatically inactive can refer to no activity. Enzymatically inactive can refer to substantially no activity. Enzymatically inactive can refer to essentially no activity. Enzymatically inactive can refer to an activity less than 1%, less than 2%, less than 3%, less than 4%, less than 5%, less than 6%, less than 7%, less than 8%, less than 9%, or less than 10% activity compared to a wild-type exemplary activity (e.g., nucleic acid cleaving activity, wild-type CasΦ activity).

[0357] Transcription regulation can be achieved by fusing a programmable nuclease such as a dead CasΦ protein to a heterologous sequence. The heterologous sequence can be a suitable fusion partner, e.g., a polypeptide that provides an activity that increases, decreases, or otherwise regulates transcription by acting on the target nucleic acid sequence or on a polypeptide (e.g., a histone or other DNA-binding protein) associated with the target nucleic acid sequence. Non-limiting examples of suitable fusion partners include a polypeptide that provides for transcription activation activity, transcription repression activity, nuclease activity, transcription release factor activity, histone modification activity, histone acetyltransferase activity, nucleic acid association activity, DNA methylase activity, direct or indirect DNA demethylase activity, methyltransferase activity, demethylase activity, acetyltransferase activity, deacetylase activity, kinase activity, phosphatase activity, ubiquitin ligase activity, deubiquitinating activity, adenylation activity, deaminase activity, deadenylation activity, SUMOylating activity, deSUMOylating activity, ribosylation activity, deribosylation activity, myristoylation activity, or demyristoylation activity.

[0358] Illustrative modifications performed by a fusion polypeptide can comprise methylation, demethylation, acetylation, deacetylation, ubiquitination, deubiquitination, deamination, alkylation, depurination, oxidation, pyrimidine dimer formation, transposition, recombination, chain elongation, ligation, glycosylation. Phosphorylation, dephosphorylation, adenylation, deadenylation, SUMOylation, deSUMOylation, ribosylation, deribosylation, myristoylation, remodeling, cleavage, oxidoreduction, hydrolation, or isomerization.

[0359] The heterologous sequence or fusion partner can be fused to the C-terminus, N-terminus, or an internal portion (e.g., a portion other than the N- or C-terminus) of the programmable nuclease, for example a dead CasΦ polypeptide. Non-limiting examples of fusion partners include transcription activators, transcription repressors, histone lysine methyltransferases (KMT), Histone Lysine Demethylates, Histone lysine acetyltransferases (KAT), Histone lysine deacetylase, DNA methylases (adenosine or cytosine modification), deaminases, CTCF, periphery recruitment elements (e.g., Lamin A, Lamin B), and protein docking elements (e.g., FKBP/FRB).

[0360] Non-limiting examples of transcription activators include GAL4, VP16, VP64, and p65 subdomain (NFkappaB).

[0361] Non-limiting examples of transcription repressors include Kruippel associated box (KRAB or SKD), the Mad mSIN3 interaction domain (SID), and the ERF repressor domain (ERD).

[0362] Non-limiting examples of histone lysine methyltransferases (KMT) include members from KMT1 family (e.g., SUV39H1, SUV39H2, G9A, ESET/SETDB1, C1r4, Su(var)3-9), KMT2 family members (e.g., hSET1A, hSET1 B, MLL 1 to 5, ASH1, and homologs (Trx, Trr, Ash1)), KMT3 family (SYMD2, NSD1), KMT4 (DOT1L and homologs), KMT5 family (Pr-SET7/8, SUV4-20H1, and homologs), KMT6 (EZH2), and KMT8 (e.g., RIZ1).

[0363] Non-limiting examples of Histone Lysine Demethylates (KDM) include members from KDM1 family (LSD1/BHC110, Splsd1/Swm1/Saf11 0, Su(var)3-3), KDM3 family (JHDM2a/b), KDM4 family (JMJD2A/JHDM3A, JMJD2B, JMJD2C/GASC1, JMJD2D, and homologs (Rph1)), KDM5 family (JARID1A/RBP2, JARID1 B/PLU-1, JARIDIC/SMCX, JARID1D/SMCY, and homologs (Lid, Jhn2, Jmj2)), and KDM6 family (e.g., UTX, JMJD3).

[0364] Non-limiting examples of KAT include members of KAT2 family (hGCN5, PCAF, and homologs (dGCN5/PCAF, Gcn5), KAT3 family (CBP, p300, and homologs (dCBP/NEJ)), KAT4, KAT5, KAT6, KAT7, KAT8, and KAT13.

[0365] In some embodiments, the disclosure provides methods for increasing transcription of a target nucleic acid sequence. The transcription of a target nucleic acid sequence can increase by at least about 1.1 fold, at least about 1.2 fold, at least about 1.3 fold, at least about 1.4 fold, at least about 1.5 fold, at least about 1.6 fold, at least about 1.7 fold, at least about 1.8 fold, at least about 1.9 fold, at least about 2 fold, at least about 2.5 fold, at least about 3 fold, at least about 3.5 fold, at least about 4 fold, at least about 4.5 fold, at least about 5 fold, at least about 6 fold, at least about 7 fold, at least about 8 fold, at least about 9 fold, at least about 10 fold, at least about 12 fold, at least about 15 fold, at least about 20-fold, at least about 50-fold, at least about 70-fold, or at least about 100-fold compared to the level of transcription of the target nucleic acid sequence in the absence of a fusion polypeptide comprising a enzymatically inactive or enzymatically reduced programmable nuclease (e.g., dead CasΦ protein).

[0366] In some embodiments, the disclosure provides methods for decreasing transcription of a target nucleic acid sequence. The transcription of a target nucleic acid sequence can decrease by at least about 1.1 fold, at least about 1.2 fold, at least about 1.3 fold, at least about 1.4 fold, at least about 1.5 fold, at least about 1.6 fold, at least about 1.7 fold, at least about 1.8 fold, at least about 1.9 fold, at least about 2 fold, at least about 2.5 fold, at least about 3 fold, at least about 3.5 fold, at least about 4 fold, at least about 4.5 fold, at least about 5 fold, at least about 6 fold, at least about 7 fold, at least about 8 fold, at least about 9 fold, at least about 10 fold, at least about 12 fold, at least about 15 fold, at least about 20-fold, at least about 50-fold, at least about 70-fold, or at least about 100-fold compared to the level of transcription of the target nucleic acid sequence in the absence of a fusion polypeptide comprising a enzymatically inactive or enzymatically reduced programmable nuclease (e.g., dead Cas 12j protein).

### Method of Treating a Disorder

[0367] The compositions and methods described herein may be used to treat, prevent, or inhibit an ailment in a subject. The ailments may include diseases, cancers, genetic disorders, neoplasias, and infections. In some cases, the disease or disorder for treatment is a liver disease or disorder, an eye disease or disorder, cystic fibrosis, or a muscle disease or disorder. In some cases, the ailments are associated with one or more genetic sequences, including but not limited to 11-hydroxylase deficiency; 17,20-desmolase deficiency; 17-hydroxylase deficiency; 3-hydroxyisobutyrate aciduria; 3-hydroxysteroid dehydrogenase deficiency; 46, XY gonadal dysgenesis; AAA syndrome; ABCA3 deficiency; ABCC8-associated hyperinsulinism; aceruloplasminemia; achondrogenesis type 2; acral peeling skin syndrome; acrodermatitis enteropathica; adrenocortical micronodular hyperplasia; adrenoleukodystrophies; adrenomyeloneuropathies; Aicardi-Goutieres syndrome; Alagille disease; Alpers syndrome; alpha-mannosidosis; Alstrom syndrome; Alzheimer disease; amelogenesis imperfecta; amish type microcephaly; amyotrophic lateral sclerosis (ALS); anauxetic dysplasia; androgen insensitivity syndrome; Antley-Bixler syndrome; APECED, Apert syndrome, aplasia of lacrimal and salivary glands, argininemia, arrhythmogenic right ventricular dysplasia, Arts syndrome, ARVD2, arylsulfatase deficiency type metachromatic leokodystrophy, ataxia telangiectasia, autoimmune lymphoproliferative syndrome; autoimmune polyglandular syndrome type 1; autosomal dominant anhidrotic ectodermal dysplasia; autosomal dominant polycystic kidney disease; autosomal recessive microtia; autosomal recessive renal glucosuria; autosomal visceral heterotaxy; Bardet-Biedl syndrome; Bartter syndrome; basal cell nevus syndrome; Batten disease; benign recurrent intrahepatic cholestasis; beta-mannosidosis; Bethlem myopathy; Blackfan-Diamond anemia; blepharophimosis; Byler disease; C syndrome; CADASIL; carbamyl phosphate synthetase deficiency; cardiofaciocutaneous syndrome; Carney triad; carnitine palmitoyltransferase deficiencies; cartilage-hair hypoplasia; cb1C type of combined methylmalonic aciduria; CD18 deficiency; CD3Z-associated primary T-cell immunodeficiency; CD40L deficiency; CDAGS syndrome; CDG1A; CDG1B; CDG1M; CDG2C; CEDNIK syndrome; central core disease; centronuclear myopathy; cerebral capillary malformation; cerebrooculofacioskeletal syndrome type 4; cerebrooculogacioskeletal syndrome; cerebrotendinous xanthomatosis; CHARGE association; cherubism; CHILD syndrome; chronic granulomatous disease; chronic recurrent multifocal osteomyelitis; citrin deficiency; classic hemochromatosis; CNPPB syndrome; cobalamin C disease; Cockayne syndrome; coenzyme Q10 deficiency; Coffin-Lowry syndrome; Cohen syndrome; combined deficiency of coagulation factors V; common variable immune deficiency; complete androgen insentivity; cone rod dystrophies; conformational diseases; congenital bile adid synthesis defect type 1; congenital bile adid synthesis defect type 2; congenital defect in bile acid synthesis type; congenital erythropoietic porphyria; congenital generalized osteosclerosis; Cornelia de Lange syndrome; Cousin syndrome; Cowden disease; COX deficiency; Crigler-Najjar disease; Crigler-Najjar syndrome type 1; Crisponi syndrome; Currarino syndrome; Curth-Macklin type ichthyosis hystrix; cutis laxa; cystic fibrosis; cystinosis; d-2-hydroxyglutaric aciduria; DDP syndrome; Dejerine-Sottas disease; Denys-Drash syndrome; desmin cardiomyopathy; desmin myopathy; DGUOK-associated mitochondrial DNA depletion; disorders of glutamate metabolism; distal spinal muscular atrophy type 5; DNA repair diseases; dominant optic atrophy; Doyne honeycomb retinal dystrophy; Duchenne muscular dystrophy; dyskeratosis congenita; Ehlers-Danlos syndrome type 4; Ehlers-Danlos syndromes; Elejalde disease; Ellis-van Creveld disease; Emery-Dreifuss muscular dystrophies; encephalomyopathic mtDNA depletion syndrome; enzymatic diseases; EPCAM-associated congenital tufting enteropathy; epidermolysis bullosa with pyloric atresia; exercise-induced hypoglycemia; facioscapulohumeral muscular dystrophy; Faisalabad histiocytosis; familial atypical mycobacteriosis; familial capillary malformation-arteriovenous; familial esophageal achalasia; familial glomuvenous malformation; familial hemophagocytic lymphohistiocytosis; familial mediterranean fever; familial megacalyces; familial schwannomatosisl; familial spina bifida; familial splenic asplenia/hypoplasia; familial thrombotic thrombocytopenic purpura; Fanconi disease; Feingold syndrome; FENIB; fibrodysplasia ossificans progressiva; FKTN; Francois-Neetens fleck corneal dystrophy; Frasier syndrome; Friedreich ataxia; FTDP-17; fucosidosis; G6PD deficiency; galactosialidosis; Galloway syndrome; Gardner syndrome; Gaucher disease; Gitelman syndrome; GLUT1 deficiency; glycogen storage disease type 1b; glycogen storage disease type 2; glycogen storage disease type 3; glycogen storage disease type 4; glycogen storage disease type 9a; glycogen storage diseases; GM1-gangliosidosis; Greenberg syndrome; Greig cephalopolysyndactyly syndrome; hair genetic diseases; HANAC syndrome; harlequin type ichtyosis congenita; HDR syndrome; hemochromatosis type 3; hemochromatosis type 4; hemophilia A; hereditary angioedema type 3; hereditary angioedemas; hereditary hemorrhagic telangiectasia; hereditary hypofibrinogenemia; hereditary intraosseous vascular malformation; hereditary leiomyomatosis and renal cell cancer; hereditary neuralgic amyotrophy; hereditary sensory and autonomic neuropathy type; Hermansky-Pudlak disease; HHH syndrome; HHT2; hidrotic ectodermal dysplasia type 1; hidrotic ectodermal dysplasias; HNF4A-associated hyperinsulinism; HNPCC; human immunodeficiency with microcephaly; Huntington disease; hyper-IgD syndrome; hyperinsulinism-hyperammonemia syndrome; hypertrophy of the retinal pigment epithelium; hypochondrogenesis; hypohidrotic ectodermal dysplasia; ICF syndrome; idiopathic congenital intestinal pseudo-obstruction; immunodeficiency with hyper-IgM type 1; immunodeficiency with hyper-IgM type 3; immunodeficiency with hyper-IgM type 4; immunodeficiency with hyper-IgM type 5; inborm errors of thyroid metabolism; infantile visceral myopathy; infantile X-linked spinal muscular atrophy; intrahepatic cholestasis of pregnancy; IPEX syndrome; IRAK4 deficiency; isolated congenital asplenia; Jeune syndrome Imag; Johanson-Blizzard syndrome; Joubert syndrome; JP-HHT syndrome; juvenile hemochromatosis; juvenile hyalin fibromatosis; juvenile nephronophthisis; Kabuki mask syndrome; Kallmann syndromes; Kartagener syndrome; KCNJ11-associated hyperinsulinism; Kearns-Sayre syndrome; Kostmann disease; Kozlowski type of spondylometaphyseal dysplasia; Krabbe disease; LADD syndrome; late infantile-onset neuronal ceroid lipofuscinosis; LCK deficiency; LDHCP syndrome; Legius syndrome; Leigh syndrome; lethal congenital contracture syndrome 2; lethal congenital contracture syndromes; lethal contractural syndrome type 3; lethal neonatal CPT deficiency type 2; lethal osteosclerotic bone dysplasia; LIG4 syndrome; lissencephaly type 1 Imag; lissencephaly type 3; Loeys-Dietz syndrome; low phospholipid-associated cholelithiasis; lysinuric protein intolerance; Maffucci syndrome; Majeed syndrome; mannose-binding protein deficiency; Marfan disease; Marshall syndrome; MASA syndrome; MCAD deficiency; McCune-Albright syndrome; MCKD2; Meckel syndrome; Meesmann corneal dystrophy; megacystis-microcolon-intestinal hypoperistalsis; megaloblastic anemia type 1; MEHMO; MELAS; Melnick-Needles syndrome; MEN2s; Menkes disease; metachromatic leukodystrophies; methylmalonic acidurias; methylvalonic aciduria; microcoria-congenital nephrosis syndrome; microvillous atrophy; mitochondrial neurogastrointestinal encephalomyopathy; monilethrix; monosomy X; mosaic trisomy 9 syndrome; Mowat-Wilson syndrome; mucolipidosis type 2; mucolipidosis type Ma; mucolipidosis type IV; mucopolysaccharidoses; mucopolysaccharidosis type 3A; mucopolysaccharidosis type 3C; mucopolysaccharidosis type 4B; multiminicore disease; multiple acyl-CoA dehydrogenation deficiency; multiple cutaneous and mucosal venous malformations; multiple endocrine neoplasia type 1; multiple sulfatase deficiency; NAIC; nail-patella syndrome; nemaline myopathies; neonatal diabetes mellitus; neonatal surfactant deficiency; nephronophtisis; Netherton disease; neurofibromatoses; neurofibromatosis type 1; Niemann-Pick disease type A; Niemann-Pick disease type B; Niemann-Pick disease type C; NKX2E; Noonan syndrome; North American Indian childhood cirrhosis; NROB1 duplication-associated DSD; ocular genetic diseases; oculo-auricular syndrome; OLEDAID; oligomeganephronia; oligomeganephronic renal hypolasia; 011ier disease; Opitz-Kaveggia syndrome; orofaciodigital syndrome type 1; orofaciodigital syndrome type 2; osseous Paget disease; otopalatodigital syndrome type 2; OXPHOS diseases; palmoplantar hyperkeratosis; panlobar nephroblastomatosis; Parkes-Weber syndrome; Parkinson disease; partial deletion of 21q22.2-q22.3; Pearson syndrome; Pelizaeus-Merzbacher disease; Pendred syndrome; pentalogy of Cantrell; peroxisomal acyl-CoA-oxidase deficiency; Peutz-Jeghers syndrome; Pfeiffer syndrome; Pierson syndrome; pigmented nodular adrenocortical disease; pipecolic acidemia; Pitt-Hopkins syndrome; plasmalogens deficiency; pleuropulmonary blastoma and cystic nephroma; polycystic lipomembranous osteodysplasia; porphyrias; premature ovarian failure; primary erythermalgia; primary hemochromatoses; primary hyperoxaluria; progressive familial intrahepatic cholestasis; propionic acidemia; pyruvate decarboxylase deficiency; RAPADILINO syndrome; renal cystinosis; rhabdoid tumor predisposition syndrome; Rieger syndrome; ring chromosome 4; Roberts syndrome; Robinow-Sorauf syndrome; Rothmund-Thomson syndrome; SCID; Saethre-Chotzen syndrome; Sandhoff disease; SC phocomelia syndrome; SCAS; Schinzel phocomelia syndrome; short rib-polydactyly syndrome type 1; short rib-polydactyly syndrome type 4; short-rib polydactyly syndrome type 2; short-rib polydactyly syndrome type 3; Shwachman disease; Shwachman-Diamond disease; sickle cell anemia; Silver-Russell syndrome; Simpson-Golabi-Behmel syndrome; Smith-Lemli-Opitz syndrome; SPG7-associated hereditary spastic paraplegia; spherocytosis; split-hand/foot malformation with long bone deficiencies; spondylocostal dysostosis; sporadic visceral myopathy with inclusion bodies; storage diseases; STRA6-associated syndrome; Tay-Sachs disease; thanatophoric dysplasia; thyroid metabolism diseases; Tourette syndrome; transthyretin-associated amyloidosis; trisomy 13; trisomy 22; trisomy 2p syndrome; tuberous sclerosis; tufting enteropathy; urea cycle diseases; Van Den Ende-Gupta syndrome; Van der Woude syndrome; variegated mosaic aneuploidy syndrome; VLCAD deficiency; von Hippel-Lindau disease; Waardenburg syndrome; WAGR syndrome; Walker-Warburg syndrome; Werner syndrome; Wilson disease; Wolcott-Rallison syndrome; Wolfram syndrome; X-linked agammaglobulinemia; X-linked chronic idiopathic intestinal pseudo-obstruction; X-linked cleft palate with ankyloglossia; X-linked dominant chondrodysplasia punctata; X-linked ectodermal dysplasia; X-linked Emery-Dreifuss muscular dystrophy; X-linked lissencephaly; X-linked lymphoproliferative disease; X-linked visceral heterotaxy; xanthinuria type 1; xanthinuria type 2; xeroderma pigmentosum; XPV; and Zellweger disease. In some embodiments, the ailment is Duchenne muscular dystrophy. In some embodiments, the ailment is myotonic dystrophy Type 1 (DM1). In some embodiments, the ailment is blindness or an inherited disease affecting the back of the eye. In some embodiments, the ailment is deafness. In some embodiments, the ailment is progeria. In some embodiments, the ailment is multiple sclerosis. In some embodiments, the ailment is cancer. In some embodiments, the ailment is a lysosomal storage disease, e.g., Hunter syndrome, Hurler syndrome. In some embodiments, the ailment is hypercholesterolemia. In some embodiments, the ailment is Stargardt macular dystrophy. In some embodiments, the ailment is In preferred embodiments, the ailment is cystic fibrosis.

[0368] In some embodiments, treating, preventing, or inhibiting an ailment in a subject may comprise contacting a target nucleic acid associated with a particular ailment to a programmable nuclease (e.g., a CasΦ programmable nuclease). In some aspects, the methods of treating, preventing, or inhibiting an ailment may involve removing, modifying, replacing, transposing, or affecting the regulation of a genomic sequence of a patient in need thereof. In some embodiments, the methods of treating, preventing, or inhibiting an ailment may involve modulating gene expression. In some embodiments, the methods of treating, preventing, or inhibiting an ailment may comprise targeting a nucleic acid sequence associated with a pathogen, such as a virus or bacteria, to a programmable nuclease of the present disclosure.

[0369] The compositions and methods described herein may be used to treat, prevent, diagnose, or identify a cancer in a subject. In some aspects, the methods may target cells or tissues. In some embodiments, the methods may be applied to subjects, such as humans. As used herein, the term “cancer” refers to a physiological condition that may be characterized by abnormal or unregulated cell growth or activity. In some cases, cancer may involve the spread of the cells exhibiting abnormal or unregulated growth or activity between various tissues in a subject. In some aspects, cancer may be a genetic condition. Examples of cancers include, but are not limited to Acute Lymphoblastic Leukemia, Acute Myeloid Leukemia, Adrenocortical Carcinoma, Anal Cancer, Astrocytomas, Bile Duct Cancer, Bladder Cancer, Bone Cancer, Brain Cancer, Breast Cancer, Bronchial Cancer, Burkitt Lymphoma, Carcinoma, Cardiac Tumors, Cervical Cancer, Chordoma, Chronic Lymphocytic Leukemia, Chronic Myelogenous Leukemia, Chronic Myeloproliferative Neoplasms, Colon Cancer, Colorectal Cancer, Craniopharyngioma, Cutaneous T-cell lymphoma, Ductal Carcinoma, Embryonal Tumors, Endometrial Cancer, Ependymoma, Esophageal Cancer, Esthesioneuroblastoma, Ewing Sarcoma, Extracranial Germ Cell Tumors, Extragonadal Germ Cell Tumors, Fallopian Tube Cancer, Fibrous Histiocytoma, Gallbladder Cancer, Gastric Cancer, Gastrointestinal Cancer, Gastrointestinal Carcinoid Cancer, Gastrointestinal Stromal Tumors, Gestational Trophoblastic Disease, Hairy Cell Leukemia, Head and Neck Cancer, Heart Tumors, Hepatocellular Cancer, Histiocytosis, Hodgkin Lymphoma, Hypopharyngeal Cancer, Intraocular Melanoma, Islet Cell Tumors, Kaposi Sarcoma, Kidney cancer, Langerhans Cell Histiocytosis, Laryngeal Cancer, Leukemia, Lip and Oral Cavity Cancer, Liver Cancer, Lung Cancer, Lymphoma, Malignant Fibrous Histiocytoma, Melanoma, Merkel Cell Carcinoma, Mesothelioma, Metastatic Squamous Neck Cancer, Midline Tract Carcinoma, Mouth Cancer, Multiple Endocrine Neoplasia Syndromes, Multiple Myeloma, Mycosis Fungoides, Myelodysplastic Syndromes, Myelogenous Leukemia, Myeloid Leukemia, Myeloproliferative Neoplasms, Nasal Cavity and Paranasal Sinus Cancer, Nasopharyngeal Cancer, Neuroblastoma, Non-Hodgkin Lymphoma, Non-Small Cell Lung Cancer, Oral Cancer, Osteosarcoma, Ovarian Cancer, Pancreatic Cancer, Pancreatic Neuroendocrine Tumors, Papillomatosis, Paraganglioma, Paranasal Sinus and Nasal Cavity Cancer, Parathyroid Cancer, Penile Cancer, Pharyngeal Cancer, Pheochromocytoma, Pituitary Tumor, Plasma Cell Neoplasm, Pleuropulmonary Blastoma, Primary Central Nervous System (CNS) Lymphoma, Primary Peritoneal Cancer, Prostate Cancer, Rectal Cancer, Recurrent Cancer, Renal Cell Cancer, Retinoblastoma, Rhabdomyosarcoma, Salivary Gland Cancer, Sezary Syndrome, Skin Cancer, Small Cell Lung Cancer, Small Intestine Cancer, Soft Tissue Sarcoma, Squamous Cell Carcinoma, Squamous Neck Cancer with Occult Primary, Stomach Cancer, T-Cell Lymphoma, Testicular Cancer, Throat Cancer, Thymoma and Thymic Carcinoma, Thyroid Cancer, Tracheobronchial Cancer, Transitional Cell Cancer of the Renal Pelvis and Ureter, Ureter Cancer, Renal Pelvis Cancer, Urethral Cancer, Uterine Cancer, Uterine Sarcoma, Vaginal Cancer, Vascular Tumors, Vulvar Cancer, and Wilms Tumor.

[0370] In some cases, a cancer is associated with one or more particular biomarkers. A biomarker is a chemical species or profile that may serve as an indicator of a cellular or organismal state (e.g., the presence or absence of a disease). Non-limiting examples of biomarkers include biomolecules, nucleic acid sequences, proteins, metabolites, nucleic acids, protein modifications. A biomarker may refer to one species or to a plurality of species, such as a cell surface profile.

[0371] The methods of the present disclosure (e.g., methods of modifying a target nucleic acid) may comprise targeting a biomarker or a nucleic acid associated with a biomarker with a programmable nuclease of the disclosure (e.g., a CasΦ). In some cases, the biomarker is a gene associated with a cancer. Non-limiting examples of genes associated with cancers include, ABL, AF4/HRX, AKT-2, ALK, ALK/NPM, AML1, AML1/MTG8, APC, ATM, AXIN2, AXL, BAP1, BARD1, BCL-2, BCL-3, BCL-6, BCR/ABL, BLM, BMPR1A, BRCA1, BRCA2, BRIP1, c-MYC, CASR, CDC73, CDH1, CDK4, CDKN1B, CDKN1C, CDKN2A, CEBPA, CHEK2, CTNNA1, DBL, DEK/CAN, DICER1, DIS3L2, E2A/PBX1, EGFR, ENL/HRX, EPCAM, ERG/TLS, ERBB, ERBB-2, ETS-1, EWS/FLI-1, FH, FLCN, FMS, FOS, FPS, GATA2, GLI, GPGSP, GREM1, HER2/neu, HOX11, HOXB13, HST, IL-3, INT-2, JUN, KIT, KS3, K-SAM, LBC, LCK, LMO1, LMO2, L-MYC, LYL-1, LYT-10, LYT-10/Cα1, MAS, MAX, MDM-2, MEN1, MET, MITF, MLH1, MLL, MOS, MSH1, MSH2, MSH3, MSH6, MTG8/AML1, MUTYH, MYB, MYH11/CBFB, NBN, NEU, NF1, NF2, N-MYC, NTHL1, OST, PALB2, PAX-5, PBX1/E2A, PDGFRA, PHOX2B, PIM-1, PMS2, POLD1, POLE, POT1, PRAD-1, PRKAR1A, PTCH1, PTEN, RAD50, RAD51C, RAD51D, RAF, RAR/PML, RAS-H, RAS-K, RAS-N, RB1, RECQL4, REL/NRG, RET, RHOM1, RHOM2, ROS, RUNX1, SDHA, SDHAF, SDHB, SDHC, SDHD, SET/CAN, SIS, SKI, SMAD4, SMARCA4, SMARCB1, SMARCE1, SRC, STK11, SUFU, TAL1, TAL2, TAN-1, TIAM1, TERC, TERT, TMEM127, TP53, TSC1, TSC2, TRK, VHL, WRN, and WT1. In some cases, a gene biomarker for cancer will carry one or more mutations. In some cases, a gene biomarker for a cancer will be upregulated or downregulated relative to a patient or sample that does not have the cancer.

[0372] The compositions and methods described herein may be suitable for autologous or allogeneic treatment, as well as ex vivo cell-based treatments.

[0373] The compositions and methods described herein may be used to treat, prevent, diagnose, or identify an infection in a subject. In some embodiments, the subject is an animal (e.g., a mammal, such as a human). In some embodiments, the subject is a plant (e.g., a crop).

[0374] In some aspects, the disclosure provides the programmable CasΦ nucleases and compositions described herein for use in a method of treatment. In some embodiments, the disclosure provides the CasΦ programmable nucleases and compositions described herein for use in a method of treating an ailment recited above.

[0375] In some aspects, the disclosure provides the programmable CasΦ nucleases and compositions described herein for use as a medicament.

### Methods of Detecting a Target Nucleic Acid

[0376] The present disclosure provides methods and compositions, which enable target nucleic acid detection by programmable nuclease platforms, such as the DNA Endonuclease Targeted CRISPR TransReporter (DETECTR) platform. In some embodiments, the target nucleic acid is a DNA. In some embodiments, the target nucleic acid is a RNA.

[0377] A number of reagents are consistent with the compositions and methods disclosed herein. The reagents described herein may be used for nicking target nucleic acids and for detection of target nucleic acids. The reagents disclosed herein can include programmable nucleases, guide nucleic acids, target nucleic acids, and buffers. As described herein, target nucleic acid comprising DNA or RNA may be modified or detected (e.g., the target nucleic acid hybridizes to the guide nucleic) using a programmable nuclease (e.g., a CasΦ as disclosed herein) and other reagents disclosed herein. As described herein, target nucleic acids comprising DNA may be an amplicon of a nucleic acid of interest and the amplicon can be detected using a programmable nuclease (e.g., a CasΦ as disclosed herein) and other reagents disclosed herein. Additionally, detection of multiple target nucleic acids is possible using two or more programmable nickases or a programmable nickase with a non-nickase programmable nuclease complexed to guide nucleic acids that target the multiple target nucleic acids, wherein the programmable nucleases exhibit different sequence-independent cleavage of the nucleic acid of a reporter (e.g., cleavage of an RNA reporter by a first programmable nuclease and cleavage of a DNA reporter by a second programmable nuclease).

[0378] In some embodiments, target nucleic acid from a sample is amplified before assaying for cleavage of reporters. Target DNA can be amplified by PCR or isothermal amplification techniques. DNA amplification methods that are compatible with the DETECTR technology can be used for programmable nucleases disclosed herein. For example, ssDNA can be amplified. Amplification of ssDNA instead of dsDNA can enable PAM-independent detection of nucleic acids by proteins with PAM requirements for dsDNA-activated trans-cleavage.

[0379] Certain programmable nucleases (e.g., a CasΦ as disclosed herein) of the disclosure can exhibit indiscriminate trans-cleavage of ssDNA, enabling their use for detection of DNA in samples. In some embodiments, target ssDNA are generated from many nucleic acid templates (RNA, ss/dsDNA) in order to achieve cleavage of the FQ reporter in the DETECTR platform. Certain programmable nucleases can be activated by ssDNA, upon which they can exhibit trans-cleavage of ssDNA and can, thereby, be used to cleave ssDNA FQ reporter molecules in the DETECTR system. These programmable nucleases can target ssDNA present in the sample, or generated and/or amplified from any number of nucleic acid templates (RNA, ssDNA, or dsDNA).

[0380] The compositions, kits and methods disclosed herein may be implemented in methods of assaying for a target nucleic acid. In some embodiments, a method of assaying for a target nucleic acid in a sample, comprises: contacting the sample to a complex comprising a guide nucleic acid comprising a segment that is reverse complementary to a segment of the target nucleic acid and a programmable nuclease (e.g., a CasΦ as disclosed herein) of the disclosure that exhibits sequence independent cleavage upon forming a complex comprising the segment of the guide nucleic acid binding to the segment of the target nucleic acid, wherein the sample comprises at least one nucleic acid comprising at least 50% sequence identity to the segment of the target nucleic acid; and assaying for cleavage of at least one reporter nucleic acids of a population of reporter nucleic acids, wherein the cleavage indicates a presence of the target nucleic acid in the sample and wherein absence of the cleavage indicates an absence of the target nucleic acid in the sample.

[0381] The target nucleic acid can be from 0.05% to 20% of total nucleic acids in the sample. Sometimes, the target nucleic acid is from 0.1% to 10% of the total nucleic acids in the sample. The target nucleic acid, in some cases, is from 0.1% to 5% of the total nucleic acids in the sample. Often, a sample comprises the segment of the target nucleic acid and at least one nucleic acid comprising less than 100% sequence identity to the segment of the target nucleic acid but no less than 50% sequence identity to the segment of the target nucleic acid. For example, the segment of the target nucleic acid comprises a mutation as compared to at least one nucleic acid comprising less than 100% sequence identity to the segment of the target nucleic acid but no less than 50% sequence identity to the segment of the target nucleic acid. Often, the segment of the target nucleic acid comprises a single nucleotide mutation as compared to at least one nucleic acid comprising less than 100% sequence identity to the segment of the target nucleic acid but no less than 50% sequence identity to the segment of the target nucleic acid.

[0382] The concentrations of the various reagents in the programmable nuclease DETECTR reaction mix can vary depending on the particular scale of the reaction. For example, the final concentration of the programmable nuclease can vary from 1 pM to 1 nM, from 1 pM to 10 pM, from 10 pM to 100 pM, from 100 pM to 1 nM, from 1 nM to 10 nM, from 10 nM to 20 nM, from 20 nM to 30 nM, from 30 nM to 40 nM, from 40 nM to 50 nM, from 50 nM to 60 nM, from 60 nM to 70 nM, from 70 nM to 80 nM, from 80 nM to 90 nM, from 90 nM to 100 nM, from 100 nM to 200 nM, from 200 nM to 300 nM, from 300 nM to 400 nM, from 400 nM to 500 nM, from 500 nM to 600 nM, from 600 nM to 700 nM, from 700 nM to 800 nM, from 800 nM to 900 nM, from 900 nM to 1000 nM. The final concentration of the sgRNA complementary to the target nucleic acid can be from 1 pM to 1 nM, from 1 pM to 10 pM, from 10 pM to 100 pM, from 100 pM to 1 nM, from 1 nM to 10 nM, from 10 nM to 20 nM, from 20 nM to 30 nM, from 30 nM to 40 nM, from 40 nM to 50 nM, from 50 nM to 60 nM, from 60 nM to 70 nM, from 70 nM to 80 nM, from 80 nM to 90 nM, from 90 nM to 100 nM, from 100 nM to 200 nM, from 200 nM to 300 nM, from 300 nM to 400 nM, from 400 nM to 500 nM, from 500 nM to 600 nM, from 600 nM to 700 nM, from 700 nM to 800 nM, from 800 nM to 900 nM, from 900 nM to 1000 nM. The concentration of the ssDNA-FQ reporter can be from 1 pM to 1 nM, from 1 pM to 10 pM, from 10 pM to 100 pM, from 100 pM to 1 nM, from 1 nM to 10 nM, from 10 nM to 20 nM, from 20 nM to 30 nM, from 30 nM to 40 nM, from 40 nM to 50 nM, from 50 nM to 60 nM, from 60 nM to 70 nM, from 70 nM to 80 nM, from 80 nM to 90 nM, from 90 nM to 100 nM, from 100 nM to 200 nM, from 200 nM to 300 nM, from 300 nM to 400 nM, from 400 nM to 500 nM, from 500 nM to 600 nM, from 600 nM to 700 nM, from 700 nM to 800 nM, from 800 nM to 900 nM, from 900 nM to 1000 nM.

[0383] An example of a DETECTR reaction comprises, consists, or consists essentially of a final concentration of 100 nM CasΦ polypeptide or variant thereof, 125 nM sgRNA, and 50 nM ssDNA-FQ reporter in a total reaction volume of 20 μL. Reactions are incubated in a fluorescence plate reader (Tecan Infinite Pro 200 M Plex) for 2 hours at 37° C. with fluorescence measurements taken every 30 seconds (e.g., 2\, ex: 485 nm; 2\, em: 535 nm). The fluorescence wavelength detected can vary depending on the reporter molecule.

[0384] Described herein are reagents comprising a single stranded reporter nucleic acid comprising a detection moiety, wherein the reporter nucleic acid (e.g., the ssDNA-FQ reporter described above) is capable of being cleaved by the programmable nuclease, upon generation and amplification of ssDNA from a nucleic acid template using the methods disclosed herein, thereby generating a first detectable signal.

[0385] The methods disclosed herein, thus, include generation and amplification of ssDNA from a target nucleic acid template (e.g., cDNA, ssDNA, or dsDNA) of interest in a sample, incubation of the ssDNA with an ssDNA activated programmable nuclease leading to indiscriminate, PAM-independent cleavage of reporter nucleic acids (also referred to as ssDNA-FQ reporters) to generate a detectable signal, and quantification of the detectable signal to detect a target nucleic acid sequence of interest.

### Reporters

[0386] Described herein are reagents comprising a reporter. The reporter can comprise a single stranded nucleic acid and a detection moiety (e.g., a labeled single stranded DNA reporter), wherein the nucleic acid is capable of being cleaved by the activated programmable nuclease (e.g., a CasΦ as disclosed herein), releasing the detection moiety, and, generating a detectable signal. As used herein, “reporter” is used interchangeably with “reporter nucleic acid” or “reporter molecule”. The programmable nucleases disclosed herein, activated upon hybridization of a guide RNA to a target nucleic acid, can cleave the reporter. Cleaving the “reporter” may be referred to herein as cleaving the “reporter nucleic acid,” the “reporter molecule,” or the “nucleic acid of the reporter.”

[0387] A major advantage of the compositions and methods disclosed herein can be the design of excess reporters to total nucleic acids in an unamplified or an amplified sample, not including the nucleic acid of the reporter. Total nucleic acids can include the target nucleic acids and non-target nucleic acids, not including the nucleic acid of the reporter. The non-target nucleic acids can be from the original sample, either lysed or unlysed. The non-target nucleic acids can also be byproducts of amplification. Thus, the non-target nucleic acids can include both non-target nucleic acids from the original sample, lysed or unlysed, and from an amplified sample. The presence of a large amount of non-target nucleic acids, an activated programmable nuclease (e.g., a CasΦ as disclosed herein) may be inhibited in its ability to bind and cleave the reporter sequences. This is because the activated programmable nuclease collaterally cleaves any nucleic acids. If total nucleic acids are in present in large amounts, they may outcompete reporters for the programmable nucleases. The compositions and methods disclosed herein are designed to have an excess of reporter to total nucleic acids, such that the detectable signals from DETECTR reactions are particularly superior. In some embodiments, the reporter can be present in at least 1.5 fold, at least 2 fold, at least 3 fold, at least 4 fold, at least 5 fold, at least 6 fold, at least 7 fold, at least 8 fold, at least 9 fold, at least 10 fold, at least 11 fold, at least 12 fold, at least 13 fold, at least 14 fold, at least 15 fold, at least 16 fold, at least 17 fold, at least 18 fold, at least 19 fold, at least 20 fold, at least 30 fold, at least 40 fold, at least 50 fold, at least 60 fold, at least 70 fold, at least 80 fold, at least 90 fold, at least 100 fold, from 1.5 fold to 100 fold, from 2 fold to 10 fold, from 10 fold to 20 fold, from 20 fold to 30 fold, from 30 fold to 40 fold, from 40 fold to 50 fold, from 50 fold to 60 fold, from 60 fold to 70 fold, from 70 fold to 80 fold, from 80 fold to 90 fold, from 90 fold to 100 fold, from 1.5 fold to 10 fold, from 1.5 fold to 20 fold, from 10 fold to 40 fold, from 20 fold to 60 fold, or from 10 fold to 80 fold excess of total nucleic acids.

[0388] Another significant advantage of the compositions and methods disclosed herein can be the design of an excess volume comprising the guide nucleic acid, the programmable nuclease (e.g., a CasΦ as disclosed herein), and the reporter, which contacts a smaller volume comprising the sample with the target nucleic acid of interest. The smaller volume comprising the sample can be unlysed sample, lysed sample, or lysed sample which has undergone any combination of reverse transcription, amplification, and in vitro transcription. The presence of various reagents in a crude, non-lysed sample, a lysed sample, or a lysed and amplified sample, such as buffer, magnesium sulfate, salts, the pH, a reducing agent, primers, dNTPs, NTPs, cellular lysates, non-target nucleic acids, primers, or other components, can inhibit the ability of the programmable nuclease to become activated or to find and cleave the nucleic acid of the reporter. This may be due to nucleic acids that are not the reporter outcompeting the nucleic acid of the reporter, for the programmable nuclease. Alternatively, various reagents in the sample may simply inhibit the activity of the programmable nuclease. Thus, the compositions and methods provided herein for contacting an excess volume comprising the guide nucleic acid, the programmable nuclease, and the reporter to a smaller volume comprising the sample with the target nucleic acid of interest provides for superior detection of the target nucleic acid by ensuring that the programmable nuclease is able to find and cleaves the nucleic acid of the reporter. In some embodiments, the volume comprising the guide nucleic acid, the programmable nuclease, and the reporter (can be referred to as “a second volume”) is 4-fold greater than a volume comprising the sample (can be referred to as “a first volume”). In some embodiments, the volume comprising the guide nucleic acid, the programmable nuclease, and the reporter (can be referred to as “a second volume”) is at least 1.5 fold, at least 2 fold, at least 3 fold, at least 4 fold, at least 5 fold, at least 6 fold, at least 7 fold, at least 8 fold, at least 9 fold, at least 10 fold, at least 11 fold, at least 12 fold, at least 13 fold, at least 14 fold, at least 15 fold, at least 16 fold, at least 17 fold, at least 18 fold, at least 19 fold, at least 20 fold, at least 30 fold, at least 40 fold, at least 50 fold, at least 60 fold, at least 70 fold, at least 80 fold, at least 90 fold, at least 100 fold, from 1.5 fold to 100 fold, from 2 fold to 10 fold, from 10 fold to 20 fold, from 20 fold to 30 fold, from 30 fold to 40 fold, from 40 fold to 50 fold, from 50 fold to 60 fold, from 60 fold to 70 fold, from 70 fold to 80 fold, from 80 fold to 90 fold, from 90 fold to 100 fold, from 1.5 fold to 10 fold, from 1.5 fold to 20 fold, from 10 fold to 40 fold, from 20 fold to 60 fold, or from 10 fold to 80 fold greater than a volume comprising the sample (can be referred to as “a first volume”). In some embodiments, the volume comprising the sample is at least 0.5 μL, at least 1 μL, at least at least 1 μL, at least 2 μL, at least 3 μt, at least 4 μL, at least 5 μL, at least 6 μL, at least 7 μL, at least 8 μL, at least 9 μL, at least 10 μL, at least 11 μL, at least 12 μL, at least 13 μL, at least 14 μL, at least 15 μL, at least 16 μL, at least 17 μL, at least 18 μL, at least 19 μL, at least 20 μL, at least 25 μL, at least 30 μL, at least 35 μL, at least 40 μL, at least 45 μL, at least 50 μL, at least 55 μL, at least 60 μL, at least 65 μL, at least 70 μL, at least 75 μL, at least 80 μL, at least 85 μL, at least 90 μL, at least 95 μL, at least 100 μL, from 0.5 μL to 5 μL, from 5 μL to 10 μL, from 10 μL to 15 μL, from 15 μL to 20 μL, from 20 μL to 25 μL, from 25 μL to 30 μL, from 30 μL to 35 μL, from 35 μL to 40 μL, from 40 μL to 45 μL, from 45 μL to 50 μL, from 10 μL to 20 μL, from 5 μL to 20 μL, from 1 μL to 40 μL, from 2 μL to 10 μL, or from 1 μL to 10 μL. In some embodiments, the volume comprising the programmable nuclease, the guide nucleic acid, and the reporter is at least 10 μL, at least 11 μL, at least 12 μL, at least 13 μL, at least 14 μL, at least 15 μL, at least 16 μL, at least 17 μL, at least 18 μL, at least 19 μL, at least 20 μL, at least 21 μL, at least 22 μL, at least 23 μL, at least 24 μL, at least 25 μL, at least 26 μL, at least 27 μL, at least 28 μL, at least 29 μL, at least 30 μL, at least 40 μL, at least 50 μL, at least 60 μL, at least 70 μL, at least 80 μL, at least 90 μL, at least 100 μL, at least 150 μL, at least 200 μL, at least 250 μL, at least 300 μL, at least 350 μL, at least 400 μL, at least 450 μL, at least 500 μL, from 10 μL to 15 μL μL, from 15 μL to 20 μL, from 20 μL to 25 μL, from 25 μL to 30 μL, from 30 μL to 35 μL, from 35 μL to 40 μL, from 40 μL to 45 μL, from 45 μL to 50 μL, from 50 μL to 55 μL, from 55 μL to 60 μL, from 60 μL to 65 μL, from 65 μL to 70 μL, from 70 μL to 75 μL, from 75 μL to 80 μL, from 80 μL to 85 μL, from 85 μL to 90 μL, from 90 μL to 95 μL, from 95 μL to 100 μL, from 100 μL to 150 μL, from 150 μL to 200 μL, from 200 μL to 250 μL, from 250 μL to 300 μL, from 300 μL to 350 μL, from 350 μL to 400 μL, from 400 μL to 450 μL, from 450 μL to 500 μL, from 10 μL to 20 μL, from 10 μL to 30 μL, from 25 μL to 35 μL, from 10 μL to 40 μL, from 20 μL to 50 μL, from 18 μL to 28 μL, or from 17 μL to 22 μL.

[0389] In some cases, the reporter nucleic acid is a single-stranded nucleic acid sequence comprising deoxyribonucleotides. In other cases, the reporter nucleic acid is a single-stranded nucleic acid sequence comprising ribonucleotides. The nucleic acid of a reporter can be a single-stranded nucleic acid sequence comprising at least one deoxyribonucleotide and at least one ribonucleotide. In some cases, the nucleic acid of a reporter is a single-stranded nucleic acid comprising at least one ribonucleotide residue at an internal position that functions as a cleavage site. In some cases, the nucleic acid of a reporter comprises at least 2, 3, 4, 5, 6, 7, 8, 9, or 10 ribonucleotide residues at an internal position. In some cases, the nucleic acid of a reporter comprises from 2 to 10, from 3 to 9, from 4 to 8, or from 5 to 7 ribonucleotide residues at an internal position. Sometimes the ribonucleotide residues are continuous. Alternatively, the ribonucleotide residues are interspersed in between non-ribonucleotide residues. In some cases, the nucleic acid of a reporter has only ribonucleotide residues. In some cases, the nucleic acid of a reporter has only deoxyribonucleotide residues. In some cases, the nucleic acid comprises nucleotides resistant to cleavage by the programmable nuclease described herein. In some cases, the nucleic acid of a reporter comprises synthetic nucleotides. In some cases, the nucleic acid of a reporter comprises at least one ribonucleotide residue and at least one non-ribonucleotide residue. In some cases, the nucleic acid of a reporter is 5-20, 5-15, 5-10, 7-20, 7-15, or 7-10 nucleotides in length. In some cases, the nucleic acid of a reporter is from 3 to 20, from 4 to 10, from 5 to 10, or from 5 to 8 nucleotides in length. In some cases, the nucleic acid of a reporter comprises at least one uracil ribonucleotide. In some cases, the nucleic acid of a reporter comprises at least two uracil ribonucleotides. Sometimes the nucleic acid of a reporter has only uracil ribonucleotides. In some cases, the nucleic acid of a reporter comprises at least one adenine ribonucleotide. In some cases, the nucleic acid of a reporter comprises at least two adenine ribonucleotides. In some cases, the nucleic acid of a reporter has only adenine ribonucleotides. In some cases, the nucleic acid of a reporter comprises at least one cytosine ribonucleotide. In some cases, the nucleic acid of a reporter comprises at least two cytosine ribonucleotides. In some cases, the nucleic acid of a reporter comprises at least one guanine ribonucleotide. In some cases, the nucleic acid of a reporter comprises at least two guanine ribonucleotides. A nucleic acid of a reporter can comprise only unmodified ribonucleotides, only unmodified deoxyribonucleotides, or a combination thereof. In some cases, the nucleic acid of a reporter is from 5 to 12 nucleotides in length. In some cases, the reporter nucleic acid is at least 2, at least 3, at least 4, at least 5, at least 6, at least 7, at least 8, at least 9, at least 10, at least 11, at least 12, at least 13, at least 14, at least 15, at least 16, at least 17, at least 18, at least 19, at least 20, at least 21, at least 22, at least 23, at least 24, at least 25, at least 26, at least 27, at least 28, at least 29, or at least 30 nucleotides in length. In some cases, the reporter nucleic acid is 2, 3, 4, 5, 6, 7, 8, 9, 10, 11, 12, 13, 14, 15, 16, 17, 18, 19, 20, 21, 22, 23, 24, 25, 26, 27, 28, 29, or 30 nucleotides in length.

[0390] The single stranded nucleic acid of a reporter comprises a detection moiety capable of generating a first detectable signal. Sometimes the reporter nucleic acid comprises a protein capable of generating a signal. A signal can be a calorimetric, potentiometric, amperometric, optical (e.g., fluorescent, colorimetric, etc.), or piezo-electric signal. In some cases, a detection moiety is on one side of the cleavage site. Optionally, a quenching moiety is on the other side of the cleavage site. Sometimes the quenching moiety is a fluorescence quenching moiety. In some cases, the quenching moiety is 5′ to the cleavage site and the detection moiety is 3′ to the cleavage site. In some cases, the detection moiety is 5′ to the cleavage site and the quenching moiety is 3′ to the cleavage site. Sometimes the quenching moiety is at the 5′ terminus of the nucleic acid of a reporter. Sometimes the detection moiety is at the 3′ terminus of the nucleic acid of a reporter. In some cases, the detection moiety is at the 5′ terminus of the nucleic acid of a reporter. In some cases, the quenching moiety is at the 3′ terminus of the nucleic acid of a reporter. In some cases, the single-stranded nucleic acid of a reporter is at least one population of the single-stranded nucleic acid capable of generating a first detectable signal. In some cases, the single-stranded nucleic acid of a reporter is a population of the single stranded nucleic acid capable of generating a first detectable signal. Optionally, there is more than one population of single-stranded nucleic acid of a reporter. In some cases, there are 2, 3, 4, 5, 6, 7, 8, 9, 10, 11, 12, 13, 14, 15, 20, 30, 40, 50, or greater than 50, or any number spanned by the range of this list of different populations of single-stranded nucleic acids of a reporter capable of generating a detectable signal. In some cases, there are from 2 to 50, from 3 to 40, from 4 to 30, from 5 to 20, or from 6 to 10 different populations of single-stranded nucleic acids of a reporter capable of generating a detectable signal.

TABLE 3
Examples of Single Stranded Nucleic Acids in a Reporter

| 5′ Detection Moiety* | Sequence (SEQ ID NO) | 3′ Quencher* |
|---|---|---|
| /56-FAM/ | TTATTATT (SEQ ID NO: 95) | /3IABkFQ/ |
| /56-FAM/ | TTATTATT (SEQ ID NO: 95) | /3IABkFQ/ |
| /5IRD700/ | TTATTATT (SEQ ID NO: 95) | /3IRQC1N/ |
| /5TYE665/ | TTATTATT (SEQ ID NO: 95) | /3IAbRQSp/ |
| /5Alex594N/ | TTATTATT (SEQ ID NO: 95) | /3IAbRQSp/ |
| /5ATTO633N/ | TTATTATT (SEQ ID NO: 95) | /3IAbRQSp/ |
| /56-FAM/ | TTTTTT (SEQ ID NO: 96) | /3IABkFQ/ |
| /56-FAM/ | TTTTTTTT (SEQ ID NO: 97) | /3IABkFQ/ |
| /56-FAM/ | TTTTTTTTTT (SEQ ID NO: 98) | /3IABkFQ/ |
| /56-FAM/ | TTTTTTTTTTTT (SEQ ID NO: 99) | /3IABkFQ/ |
| /56-FAM/ | TTTTTTTTTTTTTT (SEQ ID NO: 100) | /3IABkFQ/ |
| /56-FAM/ | AAAAAA (SEQ ID NO: 101) | /3IABkFQ/ |
| /56-FAM/ | CCCCCC (SEQ ID NO: 102) | /3IABkFQ/ |
| /56-FAM/ | GGGGGG (SEQ ID NO: 103) | /3IABkFQ/ |
| /56-FAM/ | TTATTATT (SEQ ID NO: 104) | /3IABkFQ/ |

*This Table refers to the detection moiety and quencher moiety as their tradenames and their source is identified. However, alternatives, generics, or non-tradename moieties with similar function from other sources can also be used.
/56-FAM/: 5′ 6-Fluorescein (Integrated DNA Technologies)
/3IABkFQ/: 3′ Iowa Black FQ (Integrated DNA Technologies)
/5IRD700/: 5′ IRDye 700 (Integrated DNA Technologies)
/5TYE665/: 5′ TYE 665 (Integrated DNA Technologies)
/5Alex594N/: 5′ Alexa Fluor 594 (NHS Ester) (Integrated DNA Technologies)
/5ATTO633N/: 5′ ATTO TM 633 (NHS Ester) (Integrated DNA Technologies)
/3IRQC1N/: 3′ IRDye QC-1 Quencher (Li-Cor)
/3IAbRQSp/: 3′ Iowa Black RQ (Integrated DNA Technologies)

[0391] A detection moiety can be an infrared fluorophore. A detection moiety can be a fluorophore that emits fluorescence in the range of from 500 nm and 720 nm. A detection moiety can be a fluorophore that emits fluorescence in the range of from 500 nm and 720 nm. In some cases, the detection moiety emits fluorescence at a wavelength of 700 nm or higher. In other cases, the detection moiety emits fluorescence at about 660 nm or about 670 nm. In some cases, the detection moiety emits fluorescence in the range of from 500 to 520, 500 to 540, 500 to 590, 590 to 600, 600 to 610, 610 to 620, 620 to 630, 630 to 640, 640 to 650, 650 to 660, 660 to 670, 670 to 680, 690 to 690, 690 to 700, 700 to 710, 710 to 720, or 720 to 730 nm. In some cases, the detection moiety emits fluorescence in the range from 450 nm to 750 nm, from 500 nm to 650 nm, or from 550 to 650 nm. A detection moiety can be a fluorophore that emits a detectable fluorescence signal in the same range as 6-Fluorescein, IRDye 700, TYE 665, Alex Fluor, or ATTO TM 633 (NHS Ester). A detection moiety can be fluorescein amidite, 6-Fluorescein, IRDye 700, TYE 665, Alex Fluor 594, or ATTO TM 633 (NHS Ester). A detection moiety can be a fluorophore that emits a fluorescence in the same range as 6-Fluorescein (Integrated DNA Technologies), IRDye 700 (Integrated DNA Technologies), TYE 665 (Integrated DNA Technologies), Alex Fluor 594 (Integrated DNA Technologies), or ATTO TM 633 (NHS Ester) (Integrated DNA Technologies). A detection moiety can be fluorescein amidite, 6-Fluorescein (Integrated DNA Technologies), IRDye 700 (Integrated DNA Technologies), TYE 665 (Integrated DNA Technologies), Alex Fluor 594 (Integrated DNA Technologies), or ATTO TM 633 (NHS Ester) (Integrated DNA Technologies). Any of the detection moieties described herein can be from any commercially available source, can be an alternative with a similar function, a generic, or a non-tradename of the detection moieties listed.

[0392] A detection moiety can be chosen for use based on the type of sample to be tested. For example, a detection moiety that is an infrared fluorophore is used with a urine sample. As another example, SEQ ID NO: 87 with a fluorophore that emits a fluorescence around 520 nm is used for testing in non-urine samples, and SEQ ID NO: 94 with a fluorophore that emits a fluorescence around 700 nm is used for testing in urine samples.

[0393] A quenching moiety can be chosen based on its ability to quench the detection moiety. A quenching moiety can be a non-fluorescent fluorescence quencher. A quenching moiety can quench a detection moiety that emits fluorescence in the range of from 500 nm and 720 nm. A quenching moiety can quench a detection moiety that emits fluorescence in the range of from 500 nm and 720 nm. In some cases, the quenching moiety quenches a detection moiety that emits fluorescence at a wavelength of 700 nm or higher. In other cases, the quenching moiety quenches a detection moiety that emits fluorescence at about 660 nm or about 670 nm. In some cases, the quenching moiety quenches a detection moiety that emits fluorescence in the range of from 500 to 520, 500 to 540, 500 to 590, 590 to 600, 600 to 610, 610 to 620, 620 to 630, 630 to 640, 640 to 650, 650 to 660, 660 to 670, 670 to 680, 690 to 690, 690 to 700, 700 to 710, 710 to 720, or 720 to 730 nm. In some cases, the quenching moiety quenches a detection moiety that emits fluorescence in the range from 450 nm to 750 nm, from 500 nm to 650 nm, or from 550 to 650 nm. A quenching moiety can quench fluorescein amidite, 6-Fluorescein, IRDye 700, TYE 665, Alex Fluor 594, or ATTO TM 633 (NHS Ester). A quenching moiety can be Iowa Black RQ, Iowa Black FQ or IRDye QC-1 Quencher. A quenching moiety can quench fluorescein amidite, 6-Fluorescein (Integrated DNA Technologies), IRDye 700 (Integrated DNA Technologies), TYE 665 (Integrated DNA Technologies), Alex Fluor 594 (Integrated DNA Technologies), or ATTO TM 633 (NHS Ester) (Integrated DNA Technologies). A quenching moiety can be Iowa Black RQ (Integrated DNA Technologies), Iowa Black FQ (Integrated DNA Technologies) or IRDye QC-1 Quencher (LiCor). Any of the quenching moieties described herein can be from any commercially available source, can be an alternative with a similar function, a generic, or a non-tradename of the quenching moieties listed.

[0394] The generation of the detectable signal from the release of the detection moiety indicates that cleavage by the programmable nucleases has occurred and that the sample contains the target nucleic acid. In some cases, the detection moiety comprises a fluorescent dye. Sometimes the detection moiety comprises a fluorescence resonance energy transfer (FRET) pair. In some cases, the detection moiety comprises an infrared (IR) dye. In some cases, the detection moiety comprises an ultraviolet (UV) dye. Alternatively or in combination, the detection moiety comprises a polypeptide. Sometimes the detection moiety comprises a biotin. Sometimes the detection moiety comprises at least one of avidin or streptavidin. In some instances, the detection moiety comprises a polysaccharide, a polymer, or a nanoparticle. In some instances, the detection moiety comprises a gold nanoparticle or a latex nanoparticle.

[0395] A detection moiety can be any moiety capable of generating a calorimetric, potentiometric, amperometric, optical (e.g., fluorescent, colorimetric, etc.), or piezo-electric signal. A nucleic acid of a reporter, sometimes, is protein-nucleic acid that is capable of generating a calorimetric, potentiometric, amperometric, optical (e.g., fluorescent, colorimetric, etc.), or piezo-electric signal upon cleavage of the nucleic acid. Often a calorimetric signal is heat produced after cleavage of the nucleic acids of a reporter. Sometimes, a calorimetric signal is heat absorbed after cleavage of the nucleic acids of a reporter. A potentiometric signal, for example, is electrical potential produced after cleavage of the nucleic acids of a reporter. An amperometric signal can be movement of electrons produced after the cleavage of nucleic acid of a reporter. Often, the signal is an optical signal, such as a colorimetric signal or a fluorescence signal. An optical signal is, for example, a light output produced after the cleavage of the nucleic acids of a reporter. Sometimes, an optical signal is a change in light absorbance between before and after the cleavage of nucleic acids of a reporter. Often, a piezo-electric signal is a change in mass between before and after the cleavage of the nucleic acid of a reporter.

[0396] The detectable signal can be a colorimetric signal or a signal visible by eye. In some instances, the detectable signal can be fluorescent, electrical, chemical, electrochemical, or magnetic. In some cases, the first detection signal can be generated by binding of the detection moiety to the capture molecule in the detection region, where the first detection signal indicates that the sample contained the target nucleic acid. Sometimes the system can be capable of detecting more than one type of target nucleic acid, wherein the system comprises more than one type of guide nucleic acid and more than one type of reporter nucleic acid. In some cases, the detectable signal can be generated directly by the cleavage event. Alternatively or in combination, the detectable signal can be generated indirectly by the signal event. Sometimes the detectable signal is not a fluorescent signal. In some instances, the detectable signal can be a colorimetric or color-based signal. In some cases, the detected target nucleic acid can be identified based on its spatial location on the detection region of the support medium. In some cases, the second detectable signal can be generated in a spatially distinct location than the first generated signal.

[0397] Often, the protein-nucleic acid is an enzyme-nucleic acid. The enzyme may be sterically hindered when present as in the enzyme-nucleic acid, but then functional upon cleavage from the nucleic acid. Often, the enzyme is an enzyme that produces a reaction with a substrate. An enzyme can be invertase. Often, the substrate of invertase is sucrose. A DNS reagent produces a colorimetric change when invertase converts sucrose to glucose. In some cases, it is preferred that the nucleic acid (e.g., DNA) and invertase are conjugated using a heterobifunctional linker via sulfo-SMCC chemistry. Sometimes the protein-nucleic acid is a substrate-nucleic acid. Often the substrate is a substrate that produces a reaction with an enzyme.

[0398] A protein-nucleic acid may be attached to a solid support. The solid support, for example, is a surface. A surface can be an electrode. Sometimes the solid support is a bead. Often the bead is a magnetic bead. Upon cleavage, the protein is liberated from the solid and interacts with other mixtures. For example, the protein is an enzyme, and upon cleavage of the nucleic acid of the enzyme-nucleic acid, the enzyme flows through a chamber into a mixture comprising the substrate. When the enzyme meets the enzyme substrate, a reaction occurs, such as a colorimetric reaction, which is then detected. As another example, the protein is an enzyme substrate, and upon cleavage of the nucleic acid of the enzyme substrate-nucleic acid, the enzyme flows through a chamber into a mixture comprising the enzyme. When the enzyme substrate meets the enzyme, a reaction occurs, such as a calorimetric reaction, which is then detected.

[0399] Often, the signal is a colorimetric signal or a signal visible by eye. In some instances, the signal is fluorescent, electrical, chemical, electrochemical, or magnetic. A signal can be a calorimetric, potentiometric, amperometric, optical (e.g., fluorescent, colorimetric, etc.), or piezo-electric signal. In some cases, the detectable signal is a colorimetric signal or a signal visible by eye. In some instances, the detectable signal is fluorescent, electrical, chemical, electrochemical, or magnetic. In some cases, the first detection signal is generated by binding of the detection moiety to the capture molecule in the detection region, where the first detection signal indicates that the sample contained the target nucleic acid. Sometimes the system is capable of detecting more than one type of target nucleic acid, wherein the system comprises more than one type of guide nucleic acid and more than one type of nucleic acid of a reporter. In some cases, the detectable signal is generated directly by the cleavage event. Alternatively or in combination, the detectable signal is generated indirectly by the signal event. Sometimes the detectable signal is not a fluorescent signal. In some instances, the detectable signal is a colorimetric or color-based signal. In some cases, the detected target nucleic acid is identified based on its spatial location on the detection region of the support medium. In some cases, the second detectable signal is generated in a spatially distinct location than the first generated signal.

[0400] In some cases, the threshold of detection, for a subject method of detecting a single stranded target nucleic acid in a sample, is less than or equal to 10 nM. The term “threshold of detection” is used herein to describe the minimal amount of target nucleic acid that must be present in a sample in order for detection to occur. For example, when a threshold of detection is 10 nM, then a signal can be detected when a target nucleic acid is present in the sample at a concentration of 10 nM or more. In some cases, the threshold of detection is less than or equal to 5 nM, 1 nM, 0.5 nM, 0.1 nM, 0.05 nM, 0.01 nM, 0.005 nM, 0.001 nM, 0.0005 nM, 0.0001 nM, 0.00005 nM, 0.00001 nM, 10 pM, 1 pM, 500 fM, 250 fM, 100 fM, 50 fM, 10 fM, 5 fM, 1 fM, 500 attomole (aM), 100 aM, 50 aM, 10 aM, or 1 aM. In some cases, the threshold of detection is in a range of from 1 aM to 1 nM, 1 aM to 500 pM, 1 aM to 200 pM, 1 aM to 100 pM, 1 aM to 10 pM, 1 aM to 1 pM, 1 aM to 500 fM, 1 aM to 100 fM, 1 aM to 1 fM, 1 aM to 500 aM, 1 aM to 100 aM, 1 aM to 50 aM, 1 aM to 10 aM, 10 aM to 1 nM, 10 aM to 500 pM, 10 aM to 200 pM, 10 aM to 100 pM, 10 aM to 10 pM, 10 aM to 1 pM, 10 aM to 500 fM, 10 aM to 100 fM, 10 aM to 1 fM, 10 aM to 500 aM, 10 aM to 100 aM, 10 aM to 50 aM, 100 aM to 1 nM, 100 aM to 500 pM, 100 aM to 200 pM, 100 aM to 100 pM, 100 aM to 10 pM, 100 aM to 1 pM, 100 aM to 500 fM, 100 aM to 100 fM, 100 aM to 1 fM, 100 aM to 500 aM, 500 aM to 1 nM, 500 aM to 500 pM, 500 aM to 200 pM, 500 aM to 100 pM, 500 aM to 10 pM, 500 aM to 1 pM, 500 aM to 500 fM, 500 aM to 100 fM, 500 aM to 1 fM, 1 fM to 1 nM, 1 fM to 500 pM, 1 fM to 200 pM, 1 fM to 100 pM, 1 fM to 10 pM, 1 fM to 1 pM, 10 fM to 1 nM, 10 fM to 500 pM, 10 fM to 200 pM, 10 fM to 100 pM, 10 fM to 10 pM, 10 fM to 1 pM, 500 fM to 1 nM, 500 fM to 500 pM, 500 fM to 200 pM, 500 fM to 100 pM, 500 fM to 10 pM, 500 fM to 1 pM, 800 fM to 1 nM, 800 fM to 500 pM, 800 fM to 200 pM, 800 fM to 100 pM, 800 fM to 10 pM, 800 fM to 1 pM, 1 pM to 1 nM, 1 pM to 500 pM, 1 pM to 200 pM, 1 pM to 100 pM, or 1 pM to 10 pM. In some cases, the threshold of detection in a range of from 800 fM to 100 pM, 1 pM to 10 pM, 10 fM to 500 fM, 10 fM to 50 fM, 50 fM to 100 fM, 100 fM to 250 fM, or 250 fM to 500 fM. In some cases the threshold of detection is in a range of from 2 aM to 100 pM, from 20 aM to 50 pM, from 50 aM to 20 pM, from 200 aM to 5 pM, or from 500 aM to 2 pM. In some cases, the minimum concentration at which a single stranded target nucleic acid is detected in a sample is in a range of from 1 aM to 1 nM, 10 aM to 1 nM, 100 aM to 1 nM, 500 aM to 1 nM, 1 fM to 1 nM, 1 fM to 500 pM, 1 fM to 200 pM, 1 fM to 100 pM, 1 fM to 10 pM, 1 fM to 1 pM, 10 fM to 1 nM, 10 fM to 500 pM, 10 fM to 200 pM, 10 fM to 100 pM, 10 fM to 10 pM, 10 fM to 1 pM, 500 fM to 1 nM, 500 fM to 500 pM, 500 fM to 200 pM, 500 fM to 100 pM, 500 fM to 10 pM, 500 fM to 1 pM, 800 fM to 1 nM, 800 fM to 500 pM, 800 fM to 200 pM, 800 fM to 100 pM, 800 fM to 10 pM, 800 fM to 1 pM, 1 pM to 1 nM, 1 pM to 500 pM, from 1 pM to 200 pM, 1 pM to 100 pM, or 1 pM to 10 pM. In some cases, the minimum concentration at which a single stranded target nucleic acid is detected in a sample is in a range of from 2 aM to 100 pM, from 20 aM to 50 pM, from 50 aM to 20 pM, from 200 aM to 5 pM, or from 500 aM to 2 pM. In some cases, the minimum concentration at which a single stranded target nucleic acid can be detected in a sample is in a range of from 1 aM to 100 pM. In some cases, the minimum concentration at which a single stranded target nucleic acid can be detected in a sample is in a range of from 1 fM to 100 pM. In some cases, the minimum concentration at which a single stranded target nucleic acid can be detected in a sample is in a range of from 10 fM to 100 pM. In some cases, the minimum concentration at which a single stranded target nucleic acid can be detected in a sample is in a range of from 800 fM to 100 pM. In some cases, the minimum concentration at which a single stranded target nucleic acid can be detected in a sample is in a range of from 1 pM to 10 pM. In some cases, the devices, systems, fluidic devices, kits, and methods described herein detect a target single-stranded nucleic acid in a sample comprising a plurality of nucleic acids such as a plurality of non-target nucleic acids, where the target single-stranded nucleic acid is present at a concentration as low as 1 aM, 10 aM, 100 aM, 500 aM, 1 fM, 10 fM, 500 fM, 800 fM, 1 pM, 10 pM, 100 pM, or 1 pM.

[0401] In some embodiments, the target nucleic acid is present in the cleavage reaction at a concentration of about 10 nM, about 20 nM, about 30 nM, about 40 nM, about 50 nM, about 60 nM, about 70 nM, about 80 nM, about 90 nM, about 100 nM, about 200 nM, about 300 nM, about 400 nM, about 500 nM, about 600 nM, about 700 nM, about 800 nM, about 900 nM, about 1 μM, about 10 μM, or about 100 μM. In some embodiments, the target nucleic acid is present in the cleavage reaction at a concentration of from 10 nM to 20 nM, from 20 nM to 30 nM, from 30 nM to 40 nM, from 40 nM to 50 nM, from 50 nM to 60 nM, from 60 nM to 70 nM, from 70 nM to 80 nM, from 80 nM to 90 nM, from 90 nM to 100 nM, from 100 nM to 200 nM, from 200 nM to 300 nM, from 300 nM to 400 nM, from 400 nM to 500 nM, from 500 nM to 600 nM, from 600 nM to 700 nM, from 700 nM to 800 nM, from 800 nM to 900 nM, from 900 nM to 1 μM, from 1 μM to 10 μM, from 10 μM to 100 μM, from 10 nM to 100 nM, from 10 nM to 1 μM, from 10 nM to 10 μM, from 10 nM to 100 μM, from 100 nM to 1 μM, from 100 nM to 10 μM, from 100 nM to 100 μM, or from 1 μM to 100 μM. In some embodiments, the target nucleic acid is present in the cleavage reaction at a concentration of from 20 nM to 50 μM, from 50 nM to 20 μM, or from 200 nM to 5 μM.

[0402] In some cases, the methods, compositions, reagents, enzymes, and kits described herein may be used to detect a target single-stranded nucleic acid in a sample where the sample is contacted with the reagents for a predetermined length of time sufficient for the trans-cleavage to occur or cleavage reaction to reach completion. In some cases, the devices, systems, fluidic devices, kits, and methods described herein detect a target single-stranded nucleic acid in a sample where the sample is contacted with the reagents for no greater than 60 minutes. Sometimes the sample is contacted with the reagents for no greater than 120 minutes, 110 minutes, 100 minutes, 90 minutes, 80 minutes, 70 minutes, 60 minutes, 55 minutes, 50 minutes, 45 minutes, 40 minutes, 35 minutes, 30 minutes, 25 minutes, 20 minutes, 15 minutes, 10 minutes, 5 minutes, 4 minutes, 3 minutes, 2 minutes, or 1 minute. Sometimes the sample is contacted with the reagents for at least 120 minutes, 110 minutes, 100 minutes, 90 minutes, 80 minutes, 70 minutes, 60 minutes, 55 minutes, 50 minutes, 45 minutes, 40 minutes, 35 minutes, 30 minutes, 25 minutes, 20 minutes, 15 minutes, 10 minutes, or 5 minutes. In some cases, the sample is contacted with the reagents for from 5 minutes to 120 minutes, from 5 minutes to 100 minutes, from 10 minutes to 90 minutes, from 15 minutes to 45 minutes, or from 20 minutes to 35 minutes. In some cases, the devices, systems, fluidic devices, kits, and methods described herein can detect a target nucleic acid in a sample in less than 10 hours, less than 9 hours, less than 8 hours, less than 7 hours, less than 6 hours, less than 5 hours, less than 4 hours, less than 3 hours, less than 2 hours, less than 1 hour, less than 50 minutes, less than 45 minutes, less than 40 minutes, less than 35 minutes, less than 30 minutes, less than 25 minutes, less than 20 minutes, less than 15 minutes, less than 10 minutes, less than 9 minutes, less than 8 minutes, less than 7 minutes, less than 6 minutes, or less than 5 minutes. In some cases, the devices, systems, fluidic devices, kits, and methods described herein can detect a target nucleic acid in a sample in from 5 minutes to 10 hours, from 10 minutes to 8 hours, from 15 minutes to 6 hours, from 20 minutes to 5 hours, from 30 minutes to 2 hours, or from 45 minutes to 1 hour.

[0403] When a guide nucleic acid binds to a target nucleic acid, the programmable nuclease's trans-cleavage activity can be initiated, and nucleic acids of a reporter can be cleaved, resulting in the detection of fluorescence. The guide nucleic acid may be a non-naturally occurring guide nucleic acid. A non-naturally occurring guide nucleic acid may comprise an engineered sequence having a repeat and a spacer that hybridizes to a target nucleic acid sequence of interest. A non-naturally occurring guide nucleic acid may be recombinantly expressed or chemically synthesized. Nucleic acid reporters can comprise a detection moiety, wherein the nucleic acid reporter can be cleaved by the activated programmable nuclease, thereby generating a signal. Some methods as described herein can a method of assaying for a target nucleic acid in a sample comprises contacting the sample to a complex comprising a guide nucleic acid comprising a segment that is reverse complementary to a segment of the target nucleic acid and a programmable nuclease that exhibits sequence independent cleavage upon forming a complex comprising the segment of the guide nucleic acid binding to the segment of the target nucleic acid; and assaying for a signal indicating cleavage of at least some protein-nucleic acids of a population of protein-nucleic acids, wherein the signal indicates a presence of the target nucleic acid in the sample and wherein absence of the signal indicates an absence of the target nucleic acid in the sample. The cleaving of the nucleic acid of a reporter using the programmable nuclease may cleave with an efficiency of 50% as measured by a change in a signal that is calorimetric, potentiometric, amperometric, optical (e.g., fluorescent, colorimetric, etc.), or piezo-electric, as non-limiting examples. Some methods as described herein can be a method of detecting a target nucleic acid in a sample comprising contacting the sample comprising the target nucleic acid with a guide nucleic acid targeting a target nucleic acid segment, a programmable nuclease capable of being activated when complexed with the guide nucleic acid and the target nucleic acid segment, a single stranded nucleic acid of a reporter comprising a detection moiety, wherein the nucleic acid of a reporter is capable of being cleaved by the activated programmable nuclease, thereby generating a first detectable signal, cleaving the single stranded nucleic acid of a reporter using the programmable nuclease that cleaves as measured by a change in color, and measuring the first detectable signal on the support medium. The cleaving of the single stranded nucleic acid of a reporter using the programmable nuclease may cleave with an efficiency of 50% as measured by a change in color. In some cases, the cleavage efficiency is at least 40%, 50%, 60%, 70%, 80%, 90%, or 95% as measured by a change in color. The change in color may be a detectable colorimetric signal or a signal visible by eye. The change in color may be measured as a first detectable signal. The first detectable signal can be detectable within 5 minutes of contacting the sample comprising the target nucleic acid with a guide nucleic acid targeting a target nucleic acid segment, a programmable nuclease capable of being activated when complexed with the guide nucleic acid and the target nucleic acid segment, and a single stranded nucleic acid of a reporter comprising a detection moiety, wherein the nucleic acid of a reporter is capable of being cleaved by the activated nuclease. The first detectable signal can be detectable within 1, 2, 3, 4, 5, 6, 7, 8, 9, 10, 11, 12, 13, 14, 15, 20, 25, 30, 35, 40, 45, 50, 55, 60, 70, 80, 90, 100, 110, or 120 minutes of contacting the sample. In some embodiments, the first detectable signal can be detectable within from 1 to 120, from 5 to 100, from 10 to 90, from 15 to 80, from 20 to 60, or from 30 to 45 minutes of contacting the sample.

[0404] In some cases, the methods, reagents, enzymes, and kits described herein detect a target single-stranded nucleic acid with a programmable nuclease and a single-stranded nucleic acid of a reporter in a sample where the sample is contacted with the reagents for a predetermined length of time sufficient for trans-cleavage of the single stranded nucleic acid of a reporter.

[0405] Some methods as described herein can be a method of detecting a target nucleic acid in a sample comprising contacting the sample comprising the target nucleic acid with a guide nucleic acid targeting a target sequence, a programmable nuclease capable of being activated when complexed with the guide nucleic acid and the target sequence, a single stranded reporter nucleic acid comprising a detection moiety, wherein the reporter nucleic acid is capable of being cleaved by the activated nuclease, thereby generating a first detectable signal, cleaving the single stranded reporter nucleic acid using the programmable nuclease that cleaves as measured by a change in color, and measuring the first detectable signal on the support medium. The cleaving of the single stranded reporter nucleic acid using the programmable nuclease may cleave with an efficiency of 50% as measured by a change in color. In some cases, the cleavage efficiency is at least 40%, at least 50%, at least 60%, at least 70%, at least 80%, at least 90%, or at least 95% as measured by a change in color. The change in color may be a detectable colorimetric signal or a signal visible by eye. The change in color may be measured as a first detectable signal. The first detectable signal can be detectable within 5 minutes of contacting the sample comprising the target nucleic acid with a guide nucleic acid targeting a target sequence, a programmable nuclease capable of being activated when complexed with the guide nucleic acid and the target sequence, and a single stranded reporter nucleic acid comprising a detection moiety, wherein the reporter nucleic acid is capable of being cleaved by the activated nuclease. The first detectable signal can be detectable within 1, 2, 3, 4, 5, 6, 7, 8, 9, 10, 11, 12, 13, 14, 15, 20, 25, 30, 35, 40, 45, 50, 55, 60, 70, 80, 90, 100, 110, or 120 minutes of contacting the sample.

### Multiplexing Programmable Nucleases and Programmable Nickases

[0406] Described herein are compositions comprising a programmable nuclease (e.g., a CasΦ as disclosed herein) capable of being activated when complexed with the guide nucleic acid and the target nucleic acid molecule. Furthermore, these reagents can be used with different types of programmable nuclease, e.g., for multiplexing programmable nucleases. In some embodiments, the programmable nucleases can exist in RNP complexes that target multiple genes simultaneously. In some embodiments, a programmable nickase may be multiplexed with an additional programmable nuclease. For example, a programmable nickase may be multiplexed with an additional programmable nuclease for modification or detection of a target nucleic acid. In some embodiments, a first programmable nickase may be multiplexed with a second programmable nickase. In some embodiments, the programmable nickase may be a CasΦ programmable nickase.

[0407] In some embodiments, a CasΦ polypeptide disclosed herein may be multiplexed with multiple guide nucleic acids in the same sample, wherein the guide nucleic acids may comprise different sequences.

[0408] In some embodiments, an additional programmable nuclease used in multiplexing is any suitable programmable nuclease. Sometimes, the programmable nuclease is any Cas protein (also referred to as a Cas nuclease herein). In some cases, the programmable nuclease is Cas13. In some embodiments, the Cas13 is Cas13a, Cas13b, Cas13c, Cas13d, or Cas13e. In some cases, the programmable nuclease can be Mad7 or Mad2. In some cases, the programmable nuclease is a Cas12 protein. Sometimes the Cas12 is Cas12a, Cas12b, Cas12c, Cas12d, Cas12e, Cas12g, Cas12h, or Cas12i. In some cases, the programmable nuclease is another CasΦ protein. In some cases, the programmable nuclease is Csm1, Cas9, C2c4, C2c8, C2c5, C2c10, C2c9, or CasZ. Sometimes, the Csm1 can be also called smCms1, miCms1, obCms1, or suCms1. Sometimes CasZ can be also called Cas14a, Cas14b, Cas14c, Cas14d, Cas14e, Cas14f, Cas14g, or Cas14h. Sometimes, the programmable nuclease can be a type V CRISPR-Cas system. In some cases, the programmable nuclease can be a type VI CRISPR-Cas system. Sometimes the programmable nuclease can be a type III CRISPR-Cas system.

[0409] In some cases, an additional programmable nuclease used in multiplexing can be from, for example, Leptotrichia shahii (Lsh), Listeria seeligeri (Lse), Leptotrichia buccalis (Lbu), Leptotrichia wadeu (Lwa), Rhodobacter capsulatus (Rca), Herbinix hemicellulosilytica (Hhe), Paludibacter propionicigenes (Ppr), Lachnospiraceae bacterium (Lba), Eubacterium rectale (Ere), Listeria newyorkensis (Lny), Clostridium aminophilum (Cam), Prevotella sp. (Psm), Capnocytophaga canimorsus (Cca, Lachnospiraceae bacterium (Lba), Bergeyella zoohelcum (Bzo), Prevotella intermedia (Pin), Prevotella buccae (Pbu), Alistipes sp. (Asp), Riemerella anatipestifer (Ran), Prevotella aurantiaca (Pau), Prevotella saccharolytica (Psa), Prevotella intermedia (Pin2), Capnocytophaga canimorsus (Cca), Porphyromonas gulae (Pgu), Prevotella sp. (Psp), Porphyromonas gingivalis (Pig), Prevotella intermedia (Pin3), Enterococcus italicus (Ei), Lactobacillus salivarius (Ls), or Therms thermophilus (Tt). In some cases, an additional programmable nuclease used in multiplexing can be from, for example, a phage such as a bacteriophage also called a megaphage. The nucleases may come from a particular bacteriophage Glade called Biggiephage. Any combination of programmable nucleases can be used in multiplexing. In some embodiments, multiplexing of programmable nucleases takes place in one reaction volume. In other embodiments, multiplexing of programmable nucleases takes place in separate reaction volumes in a single device.

### Amplification of a Target Nucleic Acid

[0410] Disclosed herein are methods of amplifying a target nucleic acid for detection using any of the methods, reagents, kits or devices described herein. The compositions for amplification of target nucleic acids and methods of use thereof, as described herein, are compatible with the DETECTR assay methods disclosed herein. The compositions for amplification of target nucleic acids and methods of use thereof, as described herein, are compatible with any of the programmable nucleases disclosed herein and use of said programmable nuclease in a method of detecting a target nucleic acid. A target nucleic acid can be an amplified nucleic acid of interest. The nucleic acid of interest may be any nucleic acid disclosed herein or from any sample as disclosed herein. This amplification can be thermal amplification (e.g., using PCR) or isothermal amplification. This nucleic acid amplification of the sample can improve at least one of sensitivity, specificity, or accuracy of the detection the target nucleic acid. The reagents for nucleic acid amplification can comprise a recombinase, an oligonucleotide primer, a single-stranded DNA binding (SSB) protein, and a polymerase. The nucleic acid amplification can be transcription mediated amplification (TMA). Nucleic acid amplification can be helicase dependent amplification (HDA) or circular helicase dependent amplification (cHDA). In additional cases, nucleic acid amplification is strand displacement amplification (SDA). The nucleic acid amplification can be recombinase polymerase amplification (RPA). The nucleic acid amplification can be at least one of loop mediated amplification (LAMP) or the exponential amplification reaction (EXPAR). Nucleic acid amplification is, in some cases, by rolling circle amplification (RCA), ligase chain reaction (LCR), simple method amplifying RNA targets (SMART), single primer isothermal amplification (SPIA), multiple displacement amplification (MDA), nucleic acid sequence based amplification (NASBA), hinge-initiated primer-dependent amplification of nucleic acids (HIP), nicking enzyme amplification reaction (NEAR), or improved multiple displacement amplification (IMDA). The nucleic acid amplification can be performed for no greater than 1, 2, 3, 4, 5, 6, 7, 8, 9, 10, 11, 12, 13, 14, 15, 16, 17, 18, 19, 20, 25, 30, 40, 50, or 60 minutes. Sometimes, the nucleic acid amplification reaction is performed at a temperature of around 20-45° C. The nucleic acid amplification reaction can be performed at a temperature no greater than 20° C., 25° C., 30° C., 35° C., 37° C., 40° C., 45° C. The nucleic acid amplification reaction can be performed at a temperature of at least 20° C., 25° C., 30° C., 35° C., 37° C., 40° C., or 45° C.

[0411] The compositions for amplification of target nucleic acids and methods of use thereof, as described herein, are compatible with any of the compositions comprising a programmable nuclease and a buffer, which has been developed to improve the function of the programmable nuclease and use of said compositions in a method of detecting a target nucleic acid. The compositions for amplification of target nucleic acids and methods of use thereof, as described herein, are compatible with any of the methods disclosed herein including methods of assaying for at least one base difference (e.g., assaying for a SNP or a base mutation) in a target nucleic acid sequence, methods of assaying for a target nucleic acid that lacks a PAM by amplifying the target nucleic acid sequence to introduce a PAM, and compositions used in introducing a PAM via amplification into the target nucleic acid sequence. In some cases, amplification of the target nucleic acid may increase the sensitivity of a detection reaction. In some cases, amplification of the target nucleic acid may increase the specificity of a detection reaction. Amplification of the target nucleic acid may increase the concentration of the target nucleic acid in the sample relative to the concentration of nucleic acids that do not correspond to the target nucleic acid. In some embodiments, amplification of the target nucleic acid may be used to modify the sequence of the target nucleic acid. For example, amplification may be used to insert a PAM sequence into a target nucleic acid that lacks a PAM sequence. In some cases, amplification may be used to increase the homogeneity of a target nucleic acid sequence. For example, amplification may be used to remove a nucleic acid variation that is not of interest in the target nucleic acid sequence.

[0412] An amplified target nucleic acid may be present in a DETECTR reaction in an amount relative to an amount of a programmable nuclease. In some embodiments, the amplified target nucleic acid is present in at least 1-fold, 2-fold, 3-fold, 4-fold, 5-fold, 10-fold, 25-fold, 50-fold, 100-fold, 500-fold, 1000-fold, 10,000-fold, or 100,000-fold molar excess relative to the amount of the programmable nuclease. In some embodiments, the amplified target nucleic acid is present in no more than 1-fold, 2-fold, 3-fold, 4-fold, 5-fold, 10-fold, 25-fold, 50-fold, 100-fold, 500-fold, 1000-fold, 10,000-fold, or 100,000-fold molar excess relative to the amount of the programmable nuclease. In some embodiments, the amplified target nucleic acid is present in from 1-fold to 2-fold, from 1-fold to 3-fold, from 1-fold to 4-fold, from 1-fold to 5-fold, from 1-fold to 10-fold, from 1-fold to 25-fold, from 1-fold to 50-fold, from 1-fold to 100-fold, from 1-fold to 500-fold, from 1-fold to 1000-fold, from 1-fold to 10,000-fold, from 1-fold to 100,000-fold, from 5-fold to 10-fold, from 5-fold to 25-fold, from 5-fold to 50-fold, from 5-fold to 100-fold, from 5-fold to 500-fold, from 5-fold to 1000-fold, from 5-fold to 10,000-fold, from 5-fold to 100,000-fold, from 10-fold to 25-fold, from 10-fold to 50-fold, from 10-fold to 100-fold, from 10-fold to 500-fold, from 10-fold to 1000-fold, from 10-fold to 10,000-fold, from 10-fold to 100,000-fold, from 100-fold to 500-fold, from 100-fold to 1000-fold, from 100-fold to 10,000-fold, from 100-fold to 100,000-fold, from 1000-fold to 10,000-fold, from 1000-fold to 100,000-fold, or from 10,000-fold to 100,000-fold molar excess relative to the amount of the programmable nuclease. In some embodiments, the programmable nuclease is present in at least 1-fold, 2-fold, 3-fold, 4-fold, 5-fold, 10-fold, 25-fold, 50-fold, 100-fold, 500-fold, 1000-fold, 10,000-fold, or 100,000-fold molar excess relative to the amount of the target nucleic acid. In some embodiments, the programmable nuclease is present in no more than 1-fold, 2-fold, 3-fold, 4-fold, 5-fold, 10-fold, 25-fold, 50-fold, 100-fold, 500-fold, 1000-fold, 10,000-fold, or 100,000-fold molar excess relative to the amount of the target nucleic acid. In some embodiments, the programmable nuclease is present in from 1-fold to 2-fold, from 1-fold to 3-fold, from 1-fold to 4-fold, from 1-fold to 5-fold, from 1-fold to 10-fold, from 1-fold to 25-fold, from 1-fold to 50-fold, from 1-fold to 100-fold, from 1-fold to 500-fold, from 1-fold to 1000-fold, from 1-fold to 10,000-fold, from 1-fold to 100,000-fold, from 5-fold to 10-fold, from 5-fold to 25-fold, from 5-fold to 50-fold, from 5-fold to 100-fold, from 5-fold to 500-fold, from 5-fold to 1000-fold, from 5-fold to 10,000-fold, from 5-fold to 100,000-fold, from 10-fold to 25-fold, from 10-fold to 50-fold, from 10-fold to 100-fold, from 10-fold to 500-fold, from 10-fold to 1000-fold, from 10-fold to 10,000-fold, from 10-fold to 100,000-fold, from 100-fold to 500-fold, from 100-fold to 1000-fold, from 100-fold to 10,000-fold, from 100-fold to 100,000-fold, from 1000-fold to 10,000-fold, from 1000-fold to 100,000-fold, or from 10,000-fold to 100,000-fold molar excess relative to the amount of the target nucleic acid. In some embodiments, the target nucleic acid is not present in the sample.

[0413] An amplified target nucleic acid may be present in a DETECTR reaction in an amount relative to an amount of a guide nucleic acid. In some embodiments, the amplified target nucleic acid is present in at least 1-fold, 2-fold, 3-fold, 4-fold, 5-fold, 10-fold, 25-fold, 50-fold, 100-fold, 500-fold, 1000-fold, 10,000-fold, or 100,000-fold molar excess relative to the amount of the guide nucleic acid. In some embodiments, the amplified target nucleic acid is present in no more than 1-fold, 2-fold, 3-fold, 4-fold, 5-fold, 10-fold, 25-fold, 50-fold, 100-fold, 500-fold, 1000-fold, 10,000-fold, or 100,000-fold molar excess relative to the amount of the guide nucleic acid. In some embodiments, the amplified target nucleic acid is present in from 1-fold to 2-fold, from 1-fold to 3-fold, from 1-fold to 4-fold, from 1-fold to 5-fold, from 1-fold to 10-fold, from 1-fold to 25-fold, from 1-fold to 50-fold, from 1-fold to 100-fold, from 1-fold to 500-fold, from 1-fold to 1000-fold, from 1-fold to 10,000-fold, from 1-fold to 100,000-fold, from 5-fold to 10-fold, from 5-fold to 25-fold, from 5-fold to 50-fold, from 5-fold to 100-fold, from 5-fold to 500-fold, from 5-fold to 1000-fold, from 5-fold to 10,000-fold, from 5-fold to 100,000-fold, from 10-fold to 25-fold, from 10-fold to 50-fold, from 10-fold to 100-fold, from 10-fold to 500-fold, from 10-fold to 1000-fold, from 10-fold to 10,000-fold, from 10-fold to 100,000-fold, from 100-fold to 500-fold, from 100-fold to 1000-fold, from 100-fold to 10,000-fold, from 100-fold to 100,000-fold, from 1000-fold to 10,000-fold, from 1000-fold to 100,000-fold, or from 10,000-fold to 100,000-fold molar excess relative to the amount of the guide nucleic acid. In some embodiments, the guide nucleic acid is present in at least 1-fold, 2-fold, 3-fold, 4-fold, 5-fold, 10-fold, 25-fold, 50-fold, 100-fold, 500-fold, 1000-fold, 10,000-fold, or 100,000-fold molar excess relative to the amount of the target nucleic acid. In some embodiments, the guide nucleic acid is present in no more than 1-fold, 2-fold, 3-fold, 4-fold, 5-fold, 10-fold, 25-fold, 50-fold, 100-fold, 500-fold, 1000-fold, 10,000-fold, or 100,000-fold molar excess relative to the amount of the target nucleic acid. In some embodiments, the guide nucleic acid is present in from 1-fold to 2-fold, from 1-fold to 3-fold, from 1-fold to 4-fold, from 1-fold to 5-fold, from 1-fold to 10-fold, from 1-fold to 25-fold, from 1-fold to 50-fold, from 1-fold to 100-fold, from 1-fold to 500-fold, from 1-fold to 1000-fold, from 1-fold to 10,000-fold, from 1-fold to 100,000-fold, from 5-fold to 10-fold, from 5-fold to 25-fold, from 5-fold to 50-fold, from 5-fold to 100-fold, from 5-fold to 500-fold, from 5-fold to 1000-fold, from 5-fold to 10,000-fold, from 5-fold to 100,000-fold, from 10-fold to 25-fold, from 10-fold to 50-fold, from 10-fold to 100-fold, from 10-fold to 500-fold, from 10-fold to 1000-fold, from 10-fold to 10,000-fold, from 10-fold to 100,000-fold, from 100-fold to 500-fold, from 100-fold to 1000-fold, from 100-fold to 10,000-fold, from 100-fold to 100,000-fold, from 1000-fold to 10,000-fold, from 1000-fold to 100,000-fold, or from 10,000-fold to 100,000-fold molar excess relative to the amount of the target nucleic acid. In some embodiments, the target nucleic acid is not present in the sample.

### Kits

[0414] Disclosed herein are kits for use to detect, modify, edit, or regulate a target nucleic acid sequence as disclosed herein using the methods as discuss above. In some embodiments, the kit comprises the programmable nuclease system, reagents, and the support medium. The reagents and programmable nuclease system can be provided in a reagent chamber or on the support medium. Alternatively, the reagent and programmable nuclease system can be placed into the reagent chamber or the support medium by the individual using the kit. Optionally, the kit further comprises a buffer and a dropper. The reagent chamber can be a test well or container. The opening of the reagent chamber can be large enough to accommodate the support medium. The buffer can be provided in a dropper bottle for ease of dispensing. The dropper can be disposable and transfer a fixed volume. The dropper can be used to place a sample into the reagent chamber or on the support medium.

[0415] The kit or system for detection of a target nucleic acid described herein further comprises reagents for nucleic acid amplification of target nucleic acids in the sample. Isothermal nucleic acid amplification allows the use of the kit or system in remote regions or low resource settings without specialized equipment for amplification. Often, the reagents for nucleic acid amplification comprise a recombinase, an oligonucleotide primer, a single-stranded DNA binding (SSB) protein, and a polymerase. Sometimes, nucleic acid amplification of the sample improves at least one of sensitivity, specificity, or accuracy of the assay in detecting the target nucleic acid. In some cases, the nucleic acid amplification is performed in a nucleic acid amplification region on the support medium. Alternatively, or in combination, the nucleic acid amplification is performed in a reagent chamber, and the resulting sample is applied to the support medium. Sometimes, the nucleic acid amplification is isothermal nucleic acid amplification. In some cases, the nucleic acid amplification is transcription mediated amplification (TMA). Nucleic acid amplification is helicase dependent amplification (HDA) or circular helicase dependent amplification (cHDA) in other cases. In additional cases, nucleic acid amplification is strand displacement amplification (SDA). In some cases, nucleic acid amplification is by recombinase polymerase amplification (RPA). In some cases, nucleic acid amplification is by at least one of loop mediated amplification (LAMP) or the exponential amplification reaction (EXPAR). Nucleic acid amplification is, in some cases, by rolling circle amplification (RCA), ligase chain reaction (LCR), simple method amplifying RNA targets (SMART), single primer isothermal amplification (SPIA), multiple displacement amplification (MDA), nucleic acid sequence based amplification (NASBA), hinge-initiated primer-dependent amplification of nucleic acids (HIP), nicking enzyme amplification reaction (NEAR), or improved multiple displacement amplification (IMDA). Often, the nucleic acid amplification is performed for no greater than 1, 2, 3, 4, 5, 6, 7, 8, 9, 10, 11, 12, 13, 14, 15, 16, 17, 18, 19, 20, 25, 30, 40, 50, or 60 minutes, or any value from 1 to 60 minutes. Sometimes, the nucleic acid amplification is performed for from 1 to 60, from 5 to 55, from 10 to 50, from 15 to 45, from 20 to 40, or from 25 to 35 minutes. Sometimes, the nucleic acid amplification reaction is performed at a temperature of around 20-45° C. In some cases, the nucleic acid amplification reaction is performed at a temperature no greater than 20° C., 25° C., 30° C., 35° C., 37° C., 40° C., 45° C., or any value from 20° C. to 45° C. In some cases, the nucleic acid amplification reaction is performed at a temperature of at least 20° C., 25° C., 30° C., 35° C., 37° C., 40° C., or 45° C., or any value from 20° C. to 45° C. In some cases, the nucleic acid amplification reaction is performed at a temperature of from 20° C. to 45° C., from 25° C. to 40° C., from 30° C. to 40° C., or from 35° C. to 40° C.

[0416] In some embodiments, a kit for detecting a target nucleic acid comprising a support medium; a guide nucleic acid targeting a target sequence; a programmable nuclease capable of being activated when complexed with the guide nucleic acid and the target sequence; and a reporter nucleic acid comprising a detection moiety, wherein the reporter nucleic acid is capable of being cleaved by the activated nuclease, thereby generating a first detectable signal. Often, the kit further comprises primers for amplifying a target nucleic acid of interest to produce a PAM target nucleic acid.

[0417] In some embodiments, a kit for detecting a target nucleic acid comprising a PCR plate; a guide nucleic acid targeting a target sequence; a programmable nuclease capable of being activated when complexed with the guide nucleic acid and the target sequence; and a single stranded reporter nucleic acid comprising a detection moiety, wherein the reporter nucleic acid is capable of being cleaved by the activated nuclease, thereby generating a first detectable signal. The wells of the PCR plate can be pre-aliquoted with the guide nucleic acid targeting a target sequence, a programmable nuclease capable of being activated when complexed with the guide nucleic acid and the target sequence, and at least one population of a single stranded reporter nucleic acid comprising a detection moiety. A user can thus add the biological sample of interest to a well of the pre-aliquoted PCR plate and measure for the detectable signal with a fluorescent light reader or a visible light reader.

[0418] In some embodiments, a kit for modifying a target nucleic acid comprising a support medium; a guide nucleic acid targeting a target sequence; and a programmable nuclease capable of being activated when complexed with the guide nucleic acid and the target sequence.

[0419] In some embodiments, a kit for modifying a target nucleic acid comprising a PCR plate; a guide nucleic acid targeting a target sequence; and a programmable nuclease capable of being activated when complexed with the guide nucleic acid and the target sequence. The wells of the PCR plate can be pre-aliquoted with the guide nucleic acid targeting a target sequence, and a programmable nuclease capable of being activated when complexed with the guide nucleic acid and the target sequence. A user can thus add the biological sample of interest to a well of the pre-aliquoted PCR plate.

[0420] In some instances, such kits may include a package, carrier, or container that is compartmentalized to receive one or more containers such as vials, tubes, and the like, each of the container(s) comprising one of the separate elements to be used in a method described herein.

[0421] Suitable containers include, for example, test wells, bottles, vials, and test tubes. In one embodiment, the containers are formed from a variety of materials such as glass, plastic, or polymers.

[0422] The kit or systems described herein contain packaging materials. Examples of packaging materials include, but are not limited to, pouches, blister packs, bottles, tubes, bags, containers, bottles, and any packaging material suitable for intended mode of use.

[0423] A kit typically includes labels listing contents and/or instructions for use, and package inserts with instructions for use. A set of instructions will also typically be included. In one embodiment, a label is on or associated with the container. In some instances, a label is on a container when letters, numbers or other characters forming the label are attached, molded or etched into the container itself; a label is associated with a container when it is present within a receptacle or carrier that also holds the container, e.g., as a package insert. In one embodiment, a label is used to indicate that the contents are to be used for a specific therapeutic application. The label also indicates directions for use of the contents, such as in the methods described herein.

[0424] After packaging the formed product and wrapping or boxing to maintain a sterile barrier, the product may be terminally sterilized by heat sterilization, gas sterilization, gamma irradiation, or by electron beam sterilization. Alternatively, the product may be prepared and packaged by aseptic processing.

[0425] Unless otherwise defined, all technical terms used herein have the same meaning as commonly understood by one of ordinary skill in the art to which this invention belongs. As used in this specification and the appended claims, the singular forms “a,” “an,” and “the” include plural references unless the context clearly dictates otherwise. Any reference to “or” herein is intended to encompass “and/or” unless otherwise stated.

[0426] As used herein, the term “comprising” and its grammatical equivalents specifies the presence of stated features, integers, steps, operations, elements, and/or components, but do not preclude the presence or addition of one or more other features, integers, steps, operations, elements, components, and/or groups thereof. As used herein, the term “and/or” includes any and all combinations of one or more of the associated listed items.

[0427] Unless specifically stated or obvious from context, as used herein, the term “about” in reference to a number or range of numbers is understood to mean the stated number and numbers +/−10% thereof, or 10% below the lower listed limit and 10% above the higher listed limit for the values listed for a range.

[0428] As used herein the terms “individual,” “subject,” and “patient” are used interchangeably and include any member of the animal kingdom, including humans.

[0429] Methods of the disclosure can be performed in a subject. Compositions of the disclosure can be administered to a subject. A subject can be a human. A subject can be a mammal (e.g., rat, mouse, cow, dog, pig, sheep, horse). A subject can be a vertebrate or an invertebrate. A subject can be a laboratory animal. A subject can be a patient. A subject can be suffering from a disease. A subject can display symptoms of a disease. A subject may not display symptoms of a disease, but still have a disease. A subject can be under medical care of a caregiver (e.g., the subject is hospitalized and is treated by a physician). A subject can be a plant or a crop.

[0430] Methods of the disclosure can be performed in a cell. A cell can be in vitro. A cell can be in vivo. A cell can be ex vivo. A cell can be an isolated cell. A cell can be a cell inside of an organism. A cell can be an organism. A cell can be a cell in a cell culture. A cell can be one of a collection of cells. A cell can be a mammalian cell or derived from a mammalian cell. A cell can be a rodent cell or derived from a rodent cell. A cell can be a human cell or derived from a human cell. A cell can be a prokaryotic cell or derived from a prokaryotic cell. A cell can be a bacterial cell or can be derived from a bacterial cell. A cell can be an archaeal cell or derived from an archaeal cell. A cell can be a eukaryotic cell or derived from a eukaryotic cell. A cell can be a pluripotent stem cell. A cell can be a plant cell or derived from a plant cell. A cell can be an animal cell or derived from an animal cell. A cell can be an invertebrate cell or derived from an invertebrate cell. A cell can be a vertebrate cell or derived from a vertebrate cell. A cell can be a microbe cell or derived from a microbe cell. A cell can be a fungi cell or derived from a fungi cell. A cell can be from a specific organ or tissue.

[0431] Methods of the disclosure can be performed in a eukaryotic cell or cell line. In some embodiments, the eukaryotic cell is a Chinese hamster ovary (CHO) cell. In some embodiments, the eukaryotic cell is a Human embryonic kidney 293 cells (also referred to as HEK or HEK 293) cell. In some embodiments, the eukaryotic cell is a K562 cell.

[0432] Non-limiting examples of cell lines that can be used with the disclosure include C8161, CCRF-CEM, MOLT, mIMCD-3, NHDF, HeLa-S3, Huh1, Huh4, Huh7, HUVEC, HASMC, HEKn, HEKa, MiaPaCell, Panc1, PC-3, TF1, CTLL-2, CIR, Rat6, CV1, RPTE, A10, T24, J82, A375, ARH-77, Calu1, SW480, SW620, SKOV3, SK-UT, CaCo2, P388D1, SEM-K2, WEHI-231, HB56, TIB55, Jurkat, J45.01, LRMB, Bcl-1, BC-3, IC21, DLD2, Raw264.7, NRK, NRK-52E, MRCS, MEF, Hep G2, HeLa B, HeLa T4, COS, COS-1, COS-6, COS-M6A, BS-C-1 monkey kidney epithelial, BALB/3T3 mouse embryo fibroblast, 3T3 Swiss, 3T3-L1, 132-d5 human fetal fibroblasts; 10.1 mouse fibroblasts, 293-T, 3T3, 721, 9L, A2780, A2780ADR, A2780cis, A172, A20, A253, A431, A-549, ALC, B16, B35, BCP-1 cells, BEAS-2B, bEnd.3, BHK-21, BR 293, BxPC3, C3H-10T1/2, C6/36, Cal-27, CHO, CHO-7, CHO—IR, CHO-K1, CHO-K2, CHO-T, CHO Dhfr−/−, COR-L23, COR-L23/CPR, COR-L23/5010, COR-L23/R23, COS-7, COV-434, CML T1, CMT, CT26, D17, DH82, DU145, DuCaP, EL4, EM2, EM3, EMT6/AR1, EMT6/AR10.0, FM3, H1299, H69, HB54, HB55, HCA2, HEK-293, HeLa, Hepa1-6, Hepa1 cic7, HL-60, HMEC, HT-29, Jurkat, JY cells, K562 cells, Ku812, KCL22, KG1, KYO1, LNCap, Ma-Mel 1-48, MC-38, MCF-7, MCF-10A, MDA-MB-231, MDA-MB-468, MDA-MB-435, MDCK II, MDCK II, MOR/0.2R, MONO-MAC 6, MTD-1A, MyEnd, NCI-H69/CPR, NCI-H69/LX10, NCI-H69/LX20, NCI-H69/LX4, NIH-3T3, NALM-1, NW-145, OPCN/OPCT cell lines, Peer, PNT-1A/PNT 2, RenCa, RIN-5F, RMA/RMA5, Saos-2 cells, Sf-9, SkBr3, T2, T-47D, T84, THP1 cell line, U373, U87, U937, VCaP, Vero cells, WM39, WT-49, X63, YAC-1, and YAR. Non-limiting examples of other cells that can be used with the disclosure include immune cells, such as CART, T-cells, B-cells, NK cells, granulocytes, basophils, eosinophils, neutrophils, mast cells, monocytes, macrophages, dendritic cells, antigen-presenting cells (APC), or adaptive cells. Non-limiting examples of cells that can be used with this disclosure also include plant cells, such as Parenchyma, sclerenchyma, collenchyma, xylem, phloem, germline (e.g., pollen). Cells from lycophytes, ferns, gymnosperms, angiosperms, bryophytes, charophytes, chloropytes, rhodophytes, or glaucophytes. Non-limiting examples of cells that can be used with this disclosure also include stem cells, such as human stem cells, animal stem cells, stem cells that are not derived from human embryonic stem cells, embryonic stem cells, mesenchymal stem cells, pluripotent stem cells, induced pluripotent stem cells (iPS), somatic stem cells, adult stem cells, hematopoietic stem cells, tissue-specific stem cells.

[0433] Methods described herein may be used to create populations of cells comprising at least one of the cells described herein. In some cases, a population of cells comprises a non-naturally occurring compositions described herein.

[0434] Compositions of the disclosure include populations of cells, or any progeny thereof, comprising other compositions described herein or that have been modified by the methods described herein.

[0435] Methods described herein may include producing a protein from a cell or a population of cells described herein. In some cases, the method comprises producing a protein, and industrial protein, or a protein at large scale using a cell provided for herein that has been modified by any of the methods described herein. In some cases, a rodent cell or CHO cell is modified by a nuclease or cas enzyme described herein and is later used, expanded, or cultured for protein production. In some cases, a derivative or progeny of a modified CHO cell, as described herein, is used, expanded, or cultured for protein production. A method of protein production may further comprise a donor template, additional guide RNA, a buffer, a protease inhibitor, a nuclease inhibitor, or a detergent.

### EXAMPLES

[0436] The following examples are included to further describe some aspects of the present disclosure and should not be used to limit the scope of the invention.

### Example 1

[0437] Human Codon Optimized CasΦ polypeptide

[0438] Human codon-optimized nucleotide sequences of illustrative CasΦ polypeptides were prepared. TABLE 4 provides human codon optimized nucleotide sequences of illustrative CasΦ polypeptides that are suitable for use with the methods and compositions of the disclosure.

TABLE 4
Human codon optimized nucleotide sequences

| | Endogenous Amino | |
|---|---|---|
| Name | Acid Sequence | Human Codon Optimized Nucleotide Sequence |
| CasΦ.2 | MPKPAVESEFSKVLK | ATGCCTAAGCCTGCCGTGGAAAGCGAGTTCAG |
| | KHFPGERFRSSYMKR | CAAGGTGCTGAAGAAGCACTTCCCCGGCGAGC |
| | GGKILAAQGEEAVVA | GGTTCAGATCCAGCTACATGAAGAGAGGCGGC |
| | YLQGKSEEEPPNFQPP | AAGATCCTGGCCGCTCAAGGCGAAGAAGCCGT |
| | AKCHVVTKSRDFAE | GGTCGCATATCTGCAGGGCAAGAGCGAGGAA |
| | WPIMKASEAIQRYIYA | GAACCTCCTAACTTCCAGCCTCCTGCCAAGTG |
| | LSTTERAACKPGKSSE | CCACGTGGTCACCAAGAGCAGAGATTTCGCCG |
| | SHAAWFAATGVSNH | AGTGGCCCATCATGAAGGCCTCTGAAGCCATC |
| | GYSHVQGLNLIFDHT | CAGCGGTACATCTACGCCCTGAGCACAACAGA |
| | LGRYDGVLKKVQLR | AAGAGCCGCCTGCAAGCCTGGCAAGAGCAGC |
| | NEKARARLESINASR | GAATCTCACGCCGCTTGGTTTGCCGCTACCGG |
| | ADEGLPEIKAEEEEVA | CGTGTCCAATCACGGCTACTCTCATGTGCAGG |
| | TNETGHLLQPPGINPS | GCCTGAACCTGATCTTCGATCACACCCTGGGC |
| | FYVYQTISPQAYRPRD | AGATACGACGGCGTGCTGAAAAAGGTGCAGC |
| | EIVLPPEYAGYVRDPN | TGCGGAACGAGAAGGCCAGAGCCAGACTGGA |
| | APIPLGVVRNRCDIQK | ATCCATCAACGCCAGCAGAGCCGATGAGGGCC |
| | GCPGYIPEWQREAGT | TGCCTGAGATTAAGGCCGAAGAGGAAGAGGT |
| | AISPKTGKAVTVPGLS | GGCCACAAACGAAACCGGCCATCTGCTGCAGC |
| | PKKNKRMRRYWRSE | CACCTGGCATCAACCCTAGCTTCTACGTGTAC |
| | KEKAQDALLVTVRIG | CAGACAATCAGCCCTCAGGCCTACAGACCCAG |
| | TDWVVIDVRGLLRNA | GGACGAGATTGTGCTGCCTCCTGAGTATGCCG |
| | RWRTIAPKDISLNALL | GCTACGTGCGGGATCCCAACGCTCCTATTCCT |
| | DLFTGDPVIDVRRNIV | CTGGGCGTCGTGCGGAACAGATGCGACATCCA |
| | TFTYTLDACGTYARK | GAAAGGCTGCCCCGGCTACATTCCCGAGTGGC |
| | WTLKGKQTKATLDK | AGAGAGAAGCCGGCACCGCCATTTCTCCAAAG |
| | LTATQTVALVAIDLG | ACAGGCAAAGCCGTGACCGTGCCTGGCCTGTC |
| | QTNPISAGISRVTQEN | TCCTAAGAAAAACAAGCGGATGCGGCGGTACT |
| | GALQCEPLDRFTLPD | GGCGGAGCGAGAAAGAAAAAGCCCAGGACGC |
| | DLLKDISAYRIAWDR | CCTGCTGGTCACAGTGCGGATTGGCACAGATT |
| | NEEELRARSVEALPE | GGGTCGTGATCGATGTGCGCGGCCTGCTGAGA |
| | AQQAEVRALDGVSKE | AATGCCAGATGGCGGACAATCGCCCCTAAGGA |
| | TARTQLCADFGLDPK | CATCAGCCTGAACGCACTGCTGGACCTGTTCA |
| | RLPWDKMSSNTTFISE | CCGGCGATCCTGTGATTGACGTGCGGCGGAAC |
| | ALLSNSVSRDQVFFTP | ATCGTGACCTTCACCTACACACTGGACGCCTG |
| | APKKGAKKKAPVEV | CGGCACCTACGCCAGAAAGTGGACACTGAAG |
| | MRKDRTWARAYKPR | GGCAAGCAGACCAAGGCCACTCTGGACAAGC |
| | LSVEAQKLKNEALW | TGACCGCCACACAGACAGTGGCCCTGGTGGCT |
| | ALKRTSPEYLKLSRR | ATTGATCTGGGCCAGACAAACCCTATCAGCGC |
| | KEELCRRSINYVIEKT | CGGCATCAGCAGAGTGACCCAAGAAAATGGC |
| | RRRTQCQIVIPVIEDL | GCCCTGCAGTGCGAGCCCCTGGACAGATTCAC |
| | NVRFFHGSGKRLPGW | ACTGCCCGACGACCTGCTGAAGGACATCTCCG |
| | DNFFTAKKENRWFIQ | CCTATAGAATCGCCTGGGACCGCAATGAAGAG |
| | GLHKAFSDLRTHRSF | GAACTGAGAGCCAGAAGCGTGGAAGCCCTGC |
| | YVFEVRPERTSITCPK | CTGAAGCACAGCAGGCTGAAGTGCGAGCACT |
| | CGHCEVGNRDGEAFQ | GGACGGGGTGTCCAAAGAGACAGCCAGAACT |
| | CLSCGKTCNADLDVA | CAGCTGTGCGCCGACTTTGGACTGGACCCCAA |
| | THNLTQVALTGKTMP | AAGACTGCCCTGGGACAAGATGAGCAGCAAC |
| | KREEPRDAQGTAPAR | ACCACCTTCATCAGCGAGGCCCTGCTGAGCAA |
| | KTKKASKSKAPPAER | TAGCGTGTCCAGAGATCAGGTGTTCTTCACCC |
| | EDQTPAQEPSQTS | CTGCTCCAAAGAAGGGCGCCAAGAAGAAAGC |
| | (SEQ ID NO: 2) | CCCTGTCGAAGTGATGCGGAAGGACCGGACAT |
| | | GGGCCAGAGCTTACAAGCCCAGACTGTCCGTG |
| | | GAAGCTCAGAAGCTGAAGAACGAAGCCCTGT |
| | | GGGCCCTGAAGAGAACAAGCCCCGAGTACCT |
| | | GAAGCTGAGCCGGCGGAAAGAAGAACTCTGC |
| | | CGGCGGAGCATCAACTACGTGATCGAGAAAA |
| | | CCCGGCGGAGAACCCAGTGCCAGATCGTGATT |
| | | CCTGTGATCGAGGACCTGAACGTGCGGTTCTT |
| | | TCACGGCAGCGGCAAGAGACTGCCCGGCTGG |
| | | GATAATTTCTTCACCGCCAAAAAAGAAAACCG |
| | | GTGGTTCATCCAGGGCCTGCACAAGGCCTTCA |
| | | GCGACCTGAGAACCCACCGGTCCTTTTACGTG |
| | | TTCGAAGTGCGGCCCGAGCGGACCAGCATCAC |
| | | CTGTCCTAAATGCGGCCACTGCGAAGTGGGCA |
| | | ACAGAGATGGCGAGGCCTTCCAGTGTCTGAGC |
| | | TGTGGCAAGACCTGCAACGCCGACCTGGATGT |
| | | GGCCACTCACAATCTGACACAGGTGGCCCTGA |
| | | CCGGCAAGACCATGCCTAAGAGAGAGGAACC |
| | | TAGGGACGCCCAGGGTACAGCCCCTGCCAGAA |
| | | AGACAAAGAAAGCCAGCAAGAGCAAGGCCCC |
| | | TCCTGCCGAGAGAGAAGATCAGACCCCAGCTC |
| | | AAGAGCCCAGCCAGACATCT (SEQ ID NO: 1405) |
| CasΦ.4 | MEKEITELTKIRREFP | ATGGAAAAAGAGATCACCGAGCTGACCAAGA |
| | NKKFSSTDMKKAGKL | TCCGCAGAGAGTTCCCCAACAAGAAGTTCAGC |
| | LKAEGPDAVRDFLNS | AGCACCGACATGAAGAAGGCCGGCAAGCTGC |
| | CQEIIGDFKPPVKTNI | TGAAGGCCGAAGGACCTGATGCCGTGCGGGA |
| | VSISRPFEEWPVSMVG | CTTCCTGAACAGCTGCCAAGAGATCATCGGCG |
| | RAIQEYYFSLTKEELE | ACTTCAAGCCTCCAGTCAAGACCAACATCGTG |
| | SVHPGTSSEDHKSFFN | TCCATCAGCAGACCCTTCGAGGAATGGCCCGT |
| | ITGLSNYNYTSVQGL | GTCCATGGTTGGACGGGCCATCCAAGAGTACT |
| | NLIFKNAKAIYDGTLV | ACTTCAGCCTGACCAAAGAGGAACTGGAAAG |
| | KANNKNKKLEKKFN | CGTTCACCCCGGCACCAGCAGCGAGGACCACA |
| | EINHKRSLEGLPIITPD | AGAGCTTTTTCAACATCACCGGCCTGAGCAAC |
| | FEEPFDENGHLNNPPG | TACAACTACACCAGCGTGCAGGGCCTGAACCT |
| | INRNIYGYQGCAAKV | GATCTTCAAGAACGCCAAGGCCATCTACGACG |
| | FVPSKHKMVSLPKEY | GCACCCTGGTCAAGGCCAACAACAAGAACAA |
| | EGYNRDPNLSLAGFR | GAAGCTCGAGAAGAAGTTTAACGAGATCAAC |
| | NRLEIPEGEPGHVPWF | CACAAGCGGAGCCTGGAAGGCCTGCCTATCAT |
| | QRMDIPEGQIGHVNKI | CACCCCTGATTTCGAGGAACCCTTCGACGAGA |
| | QRFNFVHGKNSGKVK | ACGGCCACCTGAACAACCCTCCAGGCATCAAC |
| | FSDKTGRVKRYHHSK | CGGAACATCTACGGCTATCAGGGCTGCGCCGC |
| | YKDATKPYKFLEESK | CAAGGTGTTCGTGCCTTCTAAGCACAAGATGG |
| | KVSALDSILAIITIGDD | TGTCCCTGCCTAAAGAGTACGAGGGCTACAAC |
| | WVVFDIRGLYRNVFY | AGGGACCCCAACCTGTCTCTGGCCGGCTTCAG |
| | RELAQKGLTAVQLLD | AAACAGACTGGAAATCCCTGAGGGCGAGCCT |
| | LFTGDPVIDPKKGVV | GGCCATGTGCCATGGTTCCAGAGAATGGATAT |
| | TFSYKEGVVPVFSQKI | CCCCGAGGGCCAGATCGGACACGTGAACAAG |
| | VPRFKSRDTLEKLTSQ | ATCCAGCGGTTCAACTTCGTGCACGGCAAGAA |
| | GPVALLSVDLGQNEP | CAGCGGCAAAGTGAAGTTCTCCGACAAGACCG |
| | VAARVCSLKNINDKIT | GCAGAGTGAAGAGATACCACCACAGCAAGTA |
| | LDNSCRISFLDDYKK | CAAGGACGCTACCAAGCCTTACAAGTTCCTGG |
| | QIKDYRDSLDELEIKI | AAGAGTCCAAGAAGGTGTCAGCCCTGGACAG |
| | RLEAINSLETNQQVEI | CATCCTGGCCATCATCACAATCGGCGACGACT |
| | RDLDVFSADRAKANT | GGGTCGTGTTCGACATCAGAGGCCTGTACCGG |
| | VDMFDIDPNLISWDS | AACGTGTTCTACAGAGAGCTGGCCCAGAAAGG |
| | MSDARVSTQISDLYL | CCTGACAGCTGTGCAACTGCTGGACCTGTTTA |
| | KNGGDESRVYFEINN | CCGGCGATCCCGTGATCGACCCCAAGAAAGGC |
| | KRIKRSDYNISQLVRP | GTGGTCACCTTCAGCTACAAAGAGGGCGTCGT |
| | KLSDSTRKNLNDSIW | CCCCGTCTTTAGCCAGAAAATCGTGCCCCGGT |
| | KLKRTSEEYLKLSKR | TCAAGAGCCGGGACACCCTGGAAAAGCTGAC |
| | KLELSRAVVNYTIRQS | CTCTCAGGGACCTGTGGCTCTGCTGTCTGTGG |
| | KLLSGINDIVIILEDLD | ACCTGGGACAGAATGAACCTGTGGCCGCCAGA |
| | VKKKFNGRGIRDIGW | GTGTGCAGCCTGAAGAACATCAACGACAAGAT |
| | DNFFSSRKENRWFIPA | CACCCTGGACAACTCTTGCCGGATCAGCTTCC |
| | FHKAFSELSSNRGLCV | TGGACGACTACAAGAAGCAGATCAAGGACTA |
| | IEVNPAWTSATCPDC | CAGAGACAGCCTGGACGAGCTGGAAATCAAG |
| | GFCSKENRDGINFTCR | ATCCGGCTGGAAGCCATCAACTCCCTCGAGAC |
| | KCGVSYHADIDVATL | AAACCAGCAGGTCGAGATCAGAGATCTGGAC |
| | NIARVAVLGKPMSGP | GTGTTCAGCGCCGACCGGGCCAAAGCCAATAC |
| | ADRERLGDTKKPRVA | CGTGGACATGTTTGACATCGACCCTAACCTGA |
| | RSRKTMKRKDISNST | TCAGCTGGGACTCCATGAGCGACGCCAGAGTC |
| | VEAMVTA (SEQ ID | AGCACCCAGATCAGCGACCTGTACCTGAAGAA |
| | NO: 4) | TGGCGGCGACGAGAGCCGGGTGTACTTTGAGA |
| | | TTAACAACAAACGGATTAAGCGGAGCGACTAC |
| | | AACATCAGCCAGCTCGTGCGGCCCAAGCTGAG |
| | | CGATAGCACCAGAAAGAACCTGAACGACAGC |
| | | ATCTGGAAGCTGAAGCGGACCAGCGAGGAAT |
| | | ACCTGAAGCTGAGCAAGCGGAAGCTGGAACT |
| | | GAGCAGAGCCGTCGTGAATTACACCATCCGGC |
| | | AGAGCAAACTGCTGAGCGGCATCAATGACATC |
| | | GTGATCATTCTCGAGGACCTGGACGTGAAGAA |
| | | GAAATTCAACGGCAGAGGCATCCGCGATATCG |
| | | GCTGGGACAACTTCTTCAGCTCCCGGAAAGAA |
| | | AACCGGTGGTTCATCCCCGCCTTCCACAAGGC |
| | | CTTTAGCGAGCTGAGCAGCAACAGGGGCCTGT |
| | | GCGTGATCGAAGTGAATCCTGCCTGGACCAGC |
| | | GCCACCTGTCCTGATTGTGGCTTCTGCAGCAA |
| | | AGAAAACAGAGATGGCATCAACTTCACGTGCC |
| | | GGAAGTGCGGCGTGTCCTACCACGCCGATATT |
| | | GACGTGGCCACACTGAATATTGCCAGAGTGGC |
| | | CGTGCTGGGCAAGCCTATGTCTGGACCTGCCG |
| | | ACAGAGAGAGACTGGGCGACACCAAGAAACC |
| | | TAGAGTGGCCCGCAGCAGAAAGACCATGAAG |
| | | CGGAAGGACATCAGCAACAGCACCGTCGAGG |
| | | CCATGGTTACAGCT (SEQ ID NO: 1406) |
| CasΦ.11 | MSNTAVSTREHMSNK | ATGAGCAACACCGCCGTGTCCACCAGAGAACA |
| | TTPPSPLSLLLRAHFP | CATGTCCAACAAGACAACCCCTCCATCTCCTC |
| | GLKFESQDYKIAGKK | TGAGCCTGCTGCTGAGAGCCCACTTTCCTGGC |
| | LRDGGPEAVISYLTG | CTGAAGTTCGAGAGCCAGGACTACAAGATCGC |
| | KGQAKLKDVKPPAK | CGGCAAGAAACTGAGAGATGGCGGACCTGAG |
| | AFVIAQSRPFIEWDLV | GCCGTGATCAGCTACCTGACTGGAAAAGGCCA |
| | RVSRQIQEKIFGIPATK | GGCCAAGCTGAAGGACGTGAAGCCTCCTGCCA |
| | GRPKQDGLSETAFNE | AGGCCTTTGTGATCGCCCAGAGCAGACCCTTC |
| | AVASLEVDGKSKLNE | ATCGAGTGGGACCTCGTCAGAGTGTCCCGGCA |
| | ETRAAFYEVLGLDAP | GATCCAAGAGAAGATCTTTGGCATCCCCGCCA |
| | SLHAQAQNALIKSAIS | CCAAGGGCAGACCTAAGCAAGATGGCCTGAG |
| | IREGVLKKVENRNEK | CGAGACAGCCTTCAACGAAGCCGTGGCCAGCC |
| | NLSKTKRRKEAGEEA | TGGAAGTGGACGGCAAGAGCAAGCTGAACGA |
| | TFVEEKAHDERGYLI | GGAAACCAGAGCCGCCTTCTACGAGGTGCTGG |
| | HPPGVNQTIPGYQAV | GACTTGATGCCCCAAGCCTGCATGCTCAGGCC |
| | VIKSCPSDFIGLPSGCL | CAGAATGCCCTGATCAAGAGCGCCATCAGCAT |
| | AKESAEALTDYLPHD | CAGAGAAGGCGTGCTGAAGAAGGTGGAAAAC |
| | RMTIPKGQPGYVPEW | CGGAACGAGAAGAACCTGAGCAAGACCAAGC |
| | QHPLLNRRKNRRRRD | GGCGGAAAGAGGCTGGCGAAGAGGCCACCTT |
| | WYSASLNKPKATCSK | TGTGGAAGAGAAGGCCCACGACGAGCGGGGC |
| | RSGTPNRKNSRTDQIQ | TATCTGATTCATCCTCCTGGCGTGAACCAGAC |
| | SGRFKGAIPVLMRFQ | AATCCCCGGCTATCAGGCCGTGGTCATCAAGA |
| | DEWVIIDIRGLLRNAR | GCTGCCCCAGCGATTTCATCGGCCTGCCTAGT |
| | YRKLLKEKSTIPDLLS | GGCTGTCTGGCCAAAGAGTCTGCCGAGGCTCT |
| | LFTGDPSIDMRQGVC | GACCGATTACCTGCCTCACGACCGGATGACTA |
| | TFIYKAGQACSAKMV | TCCCCAAGGGACAGCCTGGCTATGTGCCCGAA |
| | KTKNAPEILSELTKSG | TGGCAGCACCCTCTGCTGAACAGAAGAAAGA |
| | PVVLVSIDLGQTNPIA | ACCGGCGCAGAAGAGACTGGTACAGCGCCAG |
| | AKVSRVTQLSDGQLS | CCTGAACAAGCCCAAGGCCACCTGTAGCAAGA |
| | HETLLRELLSNDSSDG | GATCCGGCACACCCAACCGGAAGAACAGCAG |
| | KEIARYRVASDRLRD | AACCGACCAGATCCAGAGCGGCAGATTCAAG |
| | KLANLAVERLSPEHK | GGCGCCATTCCTGTGCTGATGCGGTTCCAGGA |
| | SEILRAKNDTPALCKA | TGAGTGGGTCATCATCGACATCCGGGGCCTGC |
| | RVCAALGLNPEMIAW | TGAGAAACGCCCGGTATCGGAAGCTGCTGAAA |
| | DKMTPYTEFLATAYL | GAGAAGTCCACCATTCCTGACCTGCTGAGCCT |
| | EKGGDRKVATLKPKN | GTTCACCGGCGATCCCAGCATCGATATGAGAC |
| | RPEMLRRDIKFKGTE | AGGGCGTGTGCACCTTCATCTACAAGGCCGGC |
| | GVRIEVSPEAAEAYRE | CAGGCCTGTAGCGCCAAGATGGTCAAGACAA |
| | AQWDLQRTSPEYLRL | AGAACGCCCCTGAGATCCTGTCCGAGCTGACC |
| | STWKQELTKRILNQL | AAGTCTGGACCTGTGGTGCTGGTGTCCATCGA |
| | RHKAAKSSQCEVVV | CCTGGGCCAGACAAATCCTATCGCCGCCAAGG |
| | MAFEDLNIKMMHGN | TGTCCAGAGTGACCCAGCTGTCTGATGGCCAG |
| | GKWADGGWDAFFIK | CTGAGCCACGAGACACTGCTGAGGGAACTGCT |
| | KRENRWFMQAFHKS | GAGCAACGATAGCAGCGACGGCAAAGAGATC |
| | LTELGAHKGVPTIEVT | GCCCGGTACAGAGTGGCCAGCGACAGACTGA |
| | PHRTSITCTKCGHCDK | GAGACAAGCTGGCCAATCTGGCCGTGGAAAG |
| | ANRDGERFACQKCGF | ACTGAGCCCTGAGCACAAGAGCGAGATCCTGA |
| | VAHADLEIATDNIERV | GAGCCAAGAACGACACCCCTGCTCTGTGCAAG |
| | ALTGKPMPKPESERS | GCCAGAGTGTGTGCTGCCCTGGGACTGAACCC |
| | GDAKKSVGARKAAF | TGAAATGATCGCCTGGGACAAGATGACCCCTT |
| | KPEEDAEAAE (SEQ | ACACCGAGTTTCTGGCCACCGCCTACCTGGAA |
| | ID NO: 2468) | AAAGGCGGCGACAGAAAAGTGGCCACACTGA |
| | | AGCCCAAGAACAGACCCGAGATGCTGCGGCG |
| | | GGACATCAAGTTCAAGGGAACCGAGGGCGTC |
| | | AGAATCGAGGTGTCACCTGAAGCCGCCGAGGC |
| | | CTATAGAGAAGCCCAGTGGGATCTGCAGAGG |
| | | ACAAGCCCCGAGTACCTGAGACTGTCCACCTG |
| | | GAAGCAAGAGCTGACAAAGAGAATCCTGAAC |
| | | CAGCTGCGGCACAAGGCCGCCAAAAGCAGCC |
| | | AGTGTGAAGTGGTGGTCATGGCCTTCGAGGAC |
| | | CTGAACATCAAGATGATGCACGGCAACGGCA |
| | | AGTGGGCCGATGGTGGATGGGATGCCTTCTTC |
| | | ATCAAGAAACGCGAGAACCGGTGGTTCATGCA |
| | | GGCCTTCCACAAGAGCCTGACAGAGCTGGGAG |
| | | CACACAAGGGCGTGCCAACCATCGAAGTGACC |
| | | CCTCACAGAACCAGCATCACCTGTACCAAGTG |
| | | CGGCCACTGCGACAAGGCCAACAGAGATGGG |
| | | GAGAGATTCGCCTGCCAGAAATGCGGCTTTGT |
| | | GGCCCACGCCGATCTGGAAATCGCCACCGACA |
| | | ACATCGAGAGAGTGGCCCTGACAGGCAAGCC |
| | | CATGCCTAAGCCTGAGAGCGAGAGAAGCGGC |
| | | GACGCCAAGAAATCTGTGGGAGCCAGAAAGG |
| | | CCGCCTTCAAGCCTGAGGAAGATGCCGAAGCT |
| | | GCCGAG (SEQ ID NO: 1407) |
| CasΦ.12 | MIKPTVSQFLTPGFKL | ATGATCAAGCCTACCGTCAGCCAGTTTCTGAC |
| | IRNHSRTAGLKLKNE | CCCTGGCTTCAAGCTGATCCGGAACCACTCTA |
| | GEEACKKFVRENEIPK | GAACAGCCGGCCTGAAGCTGAAGAACGAGGG |
| | DECPNFQGGPAIANII | CGAAGAGGCCTGCAAGAAATTCGTGCGCGAG |
| | AKSREFTEWEIYQSSL | AACGAGATCCCCAAGGACGAGTGCCCCAACTT |
| | AIQEVIFTLPKDKLPEP | TCAAGGCGGACCCGCCATTGCCAACATCATTG |
| | ILKEEWRAQWLSEHG | CCAAGAGCCGCGAGTTCACCGAGTGGGAGATC |
| | LDTVPYKEAAGLNLII | TACCAGTCTAGCCTGGCCATCCAAGAAGTGAT |
| | KNAVNTYKGVQVKV | CTTCACCCTGCCTAAGGACAAGCTGCCCGAGC |
| | DNKNKNNLAKINRKN | CTATCCTGAAAGAGGAATGGCGAGCCCAGTGG |
| | EIAKLNGEQEISFEEIK | CTGTCTGAGCACGGACTGGATACCGTGCCTTA |
| | AFDDKGYLLQKPSPN | CAAAGAAGCCGCCGGACTGAACCTGATCATCA |
| | KSIYCYQSVSPKPFITS | AGAACGCCGTGAACACCTACAAGGGCGTGCA |
| | KYHNVNLPEEYIGYY | AGTGAAGGTGGACAACAAGAACAAAAACAAC |
| | RKSNEPIVSPYQFDRL | CTGGCCAAGATCAACCGGAAGAATGAGATCG |
| | RIPIGEPGYVPKWQYT | CCAAGCTGAACGGCGAGCAAGAGATCAGCTTC |
| | FLSKKENKRRKLSKRI | GAGGAAATCAAGGCCTTCGACGACAAGGGCT |
| | KNVSPILGIICIKKDW | ACCTGCTGCAGAAGCCCTCTCCAAACAAGAGC |
| | CVFDMRGLLRTNHW | ATCTACTGCTACCAGAGCGTGTCCCCTAAGCC |
| | KKYHKPTDSINDLFD | TTTCATCACCAGCAAGTACCACAACGTGAACC |
| | YFTGDPVIDTKANVV | TGCCTGAAGAGTACATCGGCTACTACCGGAAG |
| | RFRYKMENGIVNYKP | TCCAACGAGCCCATCGTGTCCCCATACCAGTT |
| | VREKKGKELLENICD | CGACAGACTGCGGATCCCTATCGGCGAGCCTG |
| | QNGSCKLATVDVGQ | GCTATGTGCCTAAGTGGCAGTACACCTTCCTG |
| | NNPVAIGLFELKKVN | AGCAAGAAAGAGAACAAGCGGCGGAAGCTGA |
| | GELTKTLISRHPTPIDF | GCAAGCGGATCAAGAATGTGTCCCCAATCCTG |
| | CNKITAYRERYDKLE | GGCATCATCTGCATCAAGAAAGATTGGTGCGT |
| | SSIKLDAIKQLTSEQKI | GTTCGACATGCGGGGCCTGCTGAGAACAAACC |
| | EVDNYNNNFTPQNTK | ACTGGAAGAAGTATCACAAGCCCACCGACAG |
| | QIVCSKLNINPNDLPW | CATCAACGACCTGTTCGACTACTTCACCGGCG |
| | DKMISGTHFISEKAQV | ATCCCGTGATCGACACCAAGGCCAATGTCGTG |
| | SNKSEIYFTSTDKGKT | CGGTTCCGGTACAAGATGGAAAACGGCATCGT |
| | KDVMKSDYKWFQDY | GAACTACAAGCCCGTGCGGGAAAAGAAGGGC |
| | KPKLSKEVRDALSDIE | AAAGAGCTGCTGGAAAACATCTGCGACCAGA |
| | WRLRRESLEFNKLSK | ACGGCAGCTGCAAGCTGGCCACAGTGGATGTG |
| | SREQDARQLANWISS | GGCCAGAACAACCCTGTGGCCATCGGCCTGTT |
| | MCDVIGIENLVKKNN | CGAGCTGAAAAAAGTGAACGGGGAGCTGACC |
| | FFGGSGKREPGWDNF | AAGACACTGATCAGCAGACACCCCACACCTAT |
| | YKPKKENRWWINAIH | CGATTTCTGCAACAAGATCACCGCCTACCGCG |
| | KALTELSQNKGKRVI | AGAGATACGACAAGCTGGAAAGCAGCATCAA |
| | LLPAMRTSITCPKCKY | GCTGGACGCCATCAAGCAGCTGACCAGCGAGC |
| | CDSKNRNGEKFNCLK | AGAAAATCGAAGTGGACAACTACAACAACAA |
| | CGIELNADIDVATENL | CTTCACGCCCCAGAACACCAAGCAGATCGTGT |
| | ATVAITAQSMPKPTC | GCAGCAAGCTGAATATCAACCCCAACGATCTG |
| | ERSGDAKKPVRARKA | CCCTGGGACAAGATGATCAGCGGCACCCACTT |
| | KAPEFHDKLAPSYTV | CATCAGCGAGAAGGCCCAGGTGTCCAACAAG |
| | VLREAV (SEQ ID NO: | AGCGAGATCTACTTTACCAGCACCGATAAGGG |
| | 12) | CAAGACCAAGGACGTGATGAAGTCCGACTAC |
| | | AAGTGGTTCCAGGACTATAAGCCCAAGCTGTC |
| | | CAAAGAAGTGCGGGACGCCCTGAGCGATATTG |
| | | AGTGGCGGCTGAGAAGAGAGAGCCTGGAATT |
| | | CAACAAGCTCAGCAAGAGCAGAGAGCAGGAC |
| | | GCCAGACAGCTGGCCAATTGGATCAGCAGCAT |
| | | GTGCGACGTGATCGGCATCGAGAACCTGGTCA |
| | | AGAAGAACAACTTCTTCGGCGGCAGCGGCAA |
| | | GAGAGAACCCGGCTGGGACAACTTCTACAAGC |
| | | CGAAGAAAGAAAACCGGTGGTGGATCAACGC |
| | | CATCCACAAGGCCCTGACAGAGCTGTCCCAGA |
| | | ACAAGGGAAAGAGAGTGATCCTGCTGCCTGCC |
| | | ATGCGGACCAGCATCACCTGTCCTAAGTGCAA |
| | | GTACTGCGACAGCAAGAACCGCAACGGCGAG |
| | | AAGTTCAATTGCCTGAAGTGTGGCATTGAGCT |
| | | GAACGCCGACATCGACGTGGCCACCGAAAATC |
| | | TGGCTACCGTGGCCATCACAGCCCAGAGCATG |
| | | CCTAAGCCAACCTGCGAGAGAAGCGGCGACG |
| | | CCAAGAAACCTGTGCGGGCCAGAAAAGCCAA |
| | | GGCTCCCGAGTTCCACGATAAGCTGGCCCCTA |
| | | GCTACACCGTGGTGCTGAGAGAAGCTGTG |
| | | (SEQ ID NO: 1408) |
| CasΦ.17 | MYSLEMADLKSEPSL | ATGTACAGCCTGGAAATGGCCGACCTGAAGTC |
| | LAKLLRDRFPGKYWL | CGAGCCTTCTCTGCTGGCTAAGCTGCTGAGAG |
| | PKYWKLAEKKRLTG | ACAGATTCCCCGGCAAGTACTGGCTGCCTAAG |
| | GEEAACEYMADKQL | TACTGGAAGCTGGCCGAGAAGAAGAGACTGA |
| | DSPPPNFRPPARCVIL | CAGGCGGAGAAGAAGCCGCCTGCGAGTACAT |
| | AKSRPFEDWPVHRVA | GGCTGACAAGCAGCTGGATAGCCCTCCACCTA |
| | SKAQSFVIGLSEQGFA | ACTTCCGGCCTCCAGCCAGATGTGTGATCCTG |
| | ALRAAPPSTADARRD | GCCAAGAGCAGACCCTTCGAGGATTGGCCAGT |
| | WLRSHGASEDDLMA | GCACAGAGTGGCCAGCAAGGCCCAGTCTTTTG |
| | LEAQLLETIMGNAISL | TGATCGGCCTGAGCGAGCAGGGCTTCGCTGCT |
| | HGGVLKKIDNANVK | CTTAGAGCTGCCCCTCCTAGCACAGCCGACGC |
| | AAKRLSGRNEARLNK | CAGAAGAGATTGGCTGAGAAGCCATGGCGCC |
| | GLQELPPEQEGSAYG | AGCGAGGATGATCTGATGGCTCTGGAAGCCCA |
| | ADGLLVNPPGLNLNI | GCTGCTGGAAACCATCATGGGCAACGCCATTT |
| | YCRKSCCPKPVKNTA | CTCTGCACGGCGGCGTGCTGAAGAAGATCGAC |
| | RFVGHYPGYLRDSDSI | AACGCCAACGTGAAGGCCGCCAAGAGACTGT |
| | LISGTMDRLTIIEGMP | CCGGAAGAAACGAGGCCAGACTGAACAAGGG |
| | GHIPAWQREQGLVKP | CCTGCAAGAGCTGCCTCCTGAGCAAGAGGGAT |
| | GGRRRRLSGSESNMR | CTGCCTATGGCGCCGATGGCCTGCTGGTTAAT |
| | QKVDPSTGPRRSTRS | CCTCCTGGCCTGAACCTGAACATCTACTGCAG |
| | GTVNRSNQRTGRNGD | AAAGAGCTGCTGCCCCAAGCCTGTGAAGAACA |
| | PLLVEIRMKEDWVLL | CCGCCAGATTCGTGGGACACTACCCCGGCTAC |
| | DARGLLRNLRWRESK | CTGAGAGACTCCGACAGCATCCTGATCAGCGG |
| | RGLSCDHEDLSLSGLL | CACCATGGACCGGCTGACAATCATCGAGGGAA |
| | ALFSGDPVIDPVRNEV | TGCCCGGACACATCCCCGCCTGGCAACGAGAA |
| | VFLYGEGIIPVRSTKP | CAGGGACTTGTGAAACCTGGCGGCAGAAGGC |
| | VGTRQSKKLLERQAS | GGAGACTGTCTGGCAGCGAGAGCAACATGAG |
| | MGPLTLISCDLGQTNL | ACAGAAGGTGGACCCCAGCACAGGCCCCAGA |
| | IAGRASAISLTHGSLG | AGAAGCACAAGATCCGGCACCGTGAACAGAA |
| | VRSSVRIELDPEIIKSF | GCAACCAGCGGACAGGCAGAAACGGCGATCC |
| | ERLRKDADRLETEILT | TCTGCTGGTGGAAATCCGGATGAAGGAAGATT |
| | AAKETLSDEQRGEVN | GGGTCCTGCTGGACGCCAGAGGCCTGCTGAGA |
| | SHEKDSPQTAKASLC | AATCTGAGATGGCGCGAGTCCAAGAGAGGCCT |
| | RELGLHPPSLPWGQM | GAGCTGCGATCACGAGGATCTGAGCCTGTCTG |
| | GPSTTFIADMLISHGR | GACTGCTGGCCCTGTTTTCTGGCGACCCCGTG |
| | DDDAFLSHGEFPTLE | ATCGATCCTGTGCGGAATGAGGTGGTGTTCCT |
| | KRKKFDKRFCLESRP | GTACGGCGAGGGCATCATTCCAGTGCGGAGCA |
| | LLSSETRKALNESLW | CAAAGCCTGTGGGCACCAGACAGAGCAAGAA |
| | EVKRTSSEYARLSQR | ACTGCTGGAACGGCAGGCCAGCATGGGCCCTC |
| | KKEMARRAVNFVVEI | TGACACTGATCTCTTGTGACCTGGGCCAGACC |
| | SRRKTGLSNVIVNIED | AACCTGATTGCCGGCAGAGCCTCTGCTATCAG |
| | LNVRIFHGGGKQAPG | CCTGACACATGGATCTCTGGGCGTCAGATCCA |
| | WDGFFRPKSENRWFI | GCGTGCGGATTGAGCTGGACCCCGAGATCATC |
| | QAIHKAFSDLAAHHG | AAGAGCTTCGAGCGGCTGAGAAAGGACGCCG |
| | IPVIESDPQRTSMTCPE | ACAGACTGGAAACCGAGATCCTGACCGCCGCC |
| | CGHCDSKNRNGVRFL | AAAGAAACCCTGAGCGACGAACAGAGGGGCG |
| | CKGCGASMDADFDA | AAGTGAACAGCCACGAGAAGGATAGCCCACA |
| | ACRNLERVALTGKPM | GACAGCCAAGGCCAGCCTGTGTAGAGAGCTG |
| | PKPSTSCERLLSATTG | GGACTGCACCCTCCATCTCTGCCTTGGGGACA |
| | KVCSDHSLSHDAIEK | GATGGGCCCTAGCACCACCTTTATCGCCGACA |
| | AS (SEQ ID NO: 17) | TGCTGATCTCCCACGGCAGGGACGATGATGCC |
| | | TTTCTGAGCCACGGCGAGTTCCCCACACTGGA |
| | | AAAGCGGAAGAAGTTCGATAAGCGGTTCTGCC |
| | | TGGAAAGCAGACCCCTGCTGAGCAGCGAGAC |
| | | AAGAAAGGCCCTGAACGAGTCCCTGTGGGAA |
| | | GTGAAGAGAACCAGCAGCGAGTACGCCCGGC |
| | | TGAGCCAGAGAAAGAAAGAGATGGCTAGACG |
| | | GGCCGTGAACTTCGTGGTCGAGATCTCCAGAA |
| | | GAAAGACCGGCCTGTCCAACGTGATCGTGAAC |
| | | ATCGAGGACCTGAACGTGCGGATCTTTCACGG |
| | | CGGAGGAAAACAGGCTCCTGGCTGGGATGGCT |
| | | TCTTCAGACCCAAGTCCGAGAACCGGTGGTTC |
| | | ATCCAGGCCATCCACAAGGCCTTCAGCGATCT |
| | | GGCCGCTCACCACGGAATCCCTGTGATCGAGA |
| | | GCGACCCTCAGCGGACCAGCATGACCTGTCCT |
| | | GAGTGTGGCCACTGCGACAGCAAGAACCGGA |
| | | ATGGCGTTCGGTTCCTGTGCAAAGGCTGTGGC |
| | | GCCTCCATGGACGCCGATTTTGATGCCGCCTG |
| | | CCGGAACCTGGAAAGAGTGGCTCTGACAGGC |
| | | AAGCCCATGCCTAAGCCTAGCACCTCCTGTGA |
| | | AAGACTGCTGAGCGCCACCACCGGCAAAGTGT |
| | | GCTCTGATCACTCCCTGTCTCACGACGCCATCG |
| | | AGAAGGCTTCTTAA (SEQ ID NO: 1409) |
| CasΦ.18 | MEKEITELTKIRREFP | ATGGAAAAAGAGATCACCGAGCTGACCAAGA |
| | NKKFSSTDMKKAGKL | TCCGCAGAGAGTTCCCCAACAAGAAGTTCAGC |
| | LKAEGPDAVRDFLNS | AGCACCGACATGAAGAAGGCCGGCAAGCTGC |
| | CQEIIGDFKPPVKTNI | TGAAGGCCGAAGGACCTGATGCCGTGCGGGA |
| | VSISRPFEEWPVSMVG | CTTCCTGAACAGCTGCCAAGAGATCATCGGCG |
| | RAIQEYYFSLTKEELE | ACTTCAAGCCTCCAGTCAAGACCAACATCGTG |
| | SVHPGTSSEDHKSFFN | TCCATCAGCAGACCCTTCGAGGAATGGCCCGT |
| | ITGLSNYNYTSVQGL | GTCCATGGTTGGACGGGCCATCCAAGAGTACT |
| | NLIFKNAKAIYDGTLV | ACTTCAGCCTGACCAAAGAGGAACTGGAAAG |
| | KANNKNKKLEKKFN | CGTTCACCCCGGCACCAGCAGCGAGGACCACA |
| | EINHKRSLEGLPIITPD | AGAGCTTTTTCAACATCACCGGCCTGAGCAAC |
| | FEEPFDENGHLNNPPG | TACAACTACACCAGCGTGCAGGGCCTGAACCT |
| | INRNIYGYQGCAAKV | GATCTTCAAGAACGCCAAGGCCATCTACGACG |
| | FVPSKHKMVSLPKEY | GCACCCTGGTCAAGGCCAACAACAAGAACAA |
| | EGYNRDPNLSLAGFR | GAAGCTCGAGAAGAAGTTTAACGAGATCAAC |
| | NRLEIPEGEPGHVPWF | CACAAGCGGAGCCTGGAAGGCCTGCCTATCAT |
| | QRMDIPEGQIGHVNKI | CACCCCTGATTTCGAGGAACCCTTCGACGAGA |
| | QRFNFVHGKNSGKVK | ACGGCCACCTGAACAACCCTCCAGGCATCAAC |
| | FSDKTGRVKRYHHSK | CGGAACATCTACGGCTATCAGGGCTGCGCCGC |
| | YKDATKPYKFLEESK | CAAGGTGTTCGTGCCTTCTAAGCACAAGATGG |
| | KVSALDSILAIITIGDD | TGTCCCTGCCTAAAGAGTACGAGGGCTACAAC |
| | WVVFDIRGLYRNVFY | AGGGACCCCAACCTGTCTCTGGCCGGCTTCAG |
| | RELAQKGLTAVQLLD | AAACAGACTGGAAATCCCTGAGGGCGAGCCT |
| | LFTGDPVIDPKKGVV | GGCCATGTGCCATGGTTCCAGAGAATGGATAT |
| | TFSYKEGVVPVFSQKI | CCCCGAGGGCCAGATCGGACACGTGAACAAG |
| | VPRFKSRDTLEKLTSQ | ATCCAGCGGTTCAACTTCGTGCACGGCAAGAA |
| | GPVALLSVDLGQNEP | CAGCGGCAAAGTGAAGTTCTCCGACAAGACCG |
| | VAARVCSLKNINDKIT | GCAGAGTGAAGAGATACCACCACAGCAAGTA |
| | LDNSCRISFLDDYKK | CAAGGACGCTACCAAGCCTTACAAGTTCCTGG |
| | QIKDYRDSLDELEIKI | AAGAGTCCAAGAAGGTGTCAGCCCTGGACAG |
| | RLEAINSLETNQQVEI | CATCCTGGCCATCATCACAATCGGCGACGACT |
| | RDLDVFSADRAKANT | GGGTCGTGTTCGACATCAGAGGCCTGTACCGG |
| | VDMFDIDPNLISWDS | AACGTGTTCTACAGAGAGCTGGCCCAGAAAGG |
| | MSDARVSTQISDLYL | CCTGACAGCTGTGCAACTGCTGGACCTGTTTA |
| | KNGGDESRVYFEINN | CCGGCGATCCCGTGATCGACCCCAAGAAAGGC |
| | KRIKRSDYNISQLVRP | GTGGTCACCTTCAGCTACAAAGAGGGCGTCGT |
| | KLSDSTRKNLNDSIW | CCCCGTCTTTAGCCAGAAAATCGTGCCCCGGT |
| | KLKRTSEEYLKLSKR | TCAAGAGCCGGGACACCCTGGAAAAGCTGAC |
| | KLELSRAVVNYTIRQS | CTCTCAGGGACCTGTGGCTCTGCTGTCTGTGG |
| | KLLSGINDIVIILEDLD | ACCTGGGACAGAATGAACCTGTGGCCGCCAGA |
| | VKKKFNGRGIRDIGW | GTGTGCAGCCTGAAGAACATCAACGACAAGAT |
| | DNFFSSRKENRWFIPA | CACCCTGGACAACTCTTGCCGGATCAGCTTCC |
| | FHKTFSELSSNRGLCV | TGGACGACTACAAGAAGCAGATCAAGGACTA |
| | IEVNPAWTSATCPDC | CAGAGACAGCCTGGACGAGCTGGAAATCAAG |
| | GFCSKENRDGINFTCR | ATCCGGCTGGAAGCCATCAACTCCCTCGAGAC |
| | KCGVSYHADIDVATL | AAACCAGCAGGTCGAGATCAGAGATCTGGAC |
| | NIARVAVLGKPMSGP | GTGTTCAGCGCCGACCGGGCCAAAGCCAATAC |
| | ADRERLGDTKKPRVA | CGTGGACATGTTTGACATCGACCCTAACCTGA |
| | RSRKTMKRKDISNST | TCAGCTGGGACTCCATGAGCGACGCCAGAGTC |
| | VEAMVTA (SEQ ID | AGCACCCAGATCAGCGACCTGTACCTGAAGAA |
| | NO: 18) | TGGCGGCGACGAGAGCCGGGTGTACTTTGAGA |
| | | TTAACAACAAACGGATTAAGCGGAGCGACTAC |
| | | AACATCAGCCAGCTCGTGCGGCCCAAGCTGAG |
| | | CGATAGCACCAGAAAGAACCTGAACGACAGC |
| | | ATCTGGAAGCTGAAGCGGACCAGCGAGGAAT |
| | | ACCTGAAGCTGAGCAAGCGGAAGCTGGAACT |
| | | GAGCAGAGCCGTCGTGAATTACACCATCCGGC |
| | | AGAGCAAACTGCTGAGCGGCATCAATGACATC |
| | | GTGATCATTCTCGAGGACCTGGACGTGAAGAA |
| | | GAAATTCAACGGCAGAGGCATCCGCGATATCG |
| | | GCTGGGACAACTTCTTCAGCTCCCGGAAAGAA |
| | | AACCGGTGGTTCATCCCCGCCTTCCACAAGAC |
| | | CTTTAGCGAGCTGAGCAGCAACAGGGGCCTGT |
| | | GCGTGATCGAAGTGAATCCTGCCTGGACCAGC |
| | | GCCACCTGTCCTGATTGTGGCTTCTGCAGCAA |
| | | AGAAAACAGAGATGGCATCAACTTCACGTGCC |
| | | GGAAGTGCGGCGTGTCCTACCACGCCGATATT |
| | | GACGTGGCCACACTGAATATTGCCAGAGTGGC |
| | | CGTGCTGGGCAAGCCTATGTCTGGACCTGCCG |
| | | ACAGAGAGAGACTGGGCGACACCAAGAAACC |
| | | TAGAGTGGCCCGCAGCAGAAAGACCATGAAG |
| | | CGGAAGGACATCAGCAACAGCACCGTCGAGG |
| | | CCATGGTTACAGCTTAA (SEQ ID NO: 1410) |

### Example 2

[0439] Illustrative CasΦ Guide RNA Sequences

[0440] Guide RNA sequences for complexing with the CasΦ polypeptides of the disclosure were prepared. TABLE 5 provides illustrative guide RNA sequences to target the target nucleic acid sequence TATTAAATACTCGTATTGCTGTTCGATTAT (SEQ ID NO: 1411). A guide nucleic acid of the disclosure can comprise the sequence of any of the guide RNAs provided in Table 5 or a portion thereof.

TABLE 5
Illustrative Casd guide RNA sequences

| | | | | RNA sequence |
|---|---|---|---|---|
| | | | | (5′->3′), |
| | RNA | Repeat | Spacer | shown as DNA |
| Name | Type | length | length | BOLD = spacer |
| CasΦ.2 | crRNA | 36 | 30 | GTCGGAACGCTCAACGATTGC |
| | | | CCCTC | ACGAGGGGAC |
| | | | | (SEQ ID NO: 49) |
| CasΦ.7 | crRNA | 36 | 30 | GGATCCAATCCTTTTTGATTG |
| | | | | CCCAATTCGTTGGGAC |
| | | | | (SEQ ID NO: 51) |
| CasΦ.10 | crRNA | 36 | 30 | GGATCTGAGGATCATTATTGC |
| | | | | TCGTTACGACGAGAC |
| | | | | (SEQ ID NO: 52) |
| CasΦ.18 | crRNA | 36 | 30 | ACCAAAACGACTATTGATTGC |
| | | | | CCAGTACGCTGGGAC |
| | | | | (SEQ ID NO: 57) |

### Example 3

[0441] CasΦ Acts as a Programmable Nickase

[0442] The present example shows that a CasΦ polypeptide can comprise programmable nickase activity. FIG. 1 shows data from an experiment to analyze nicking ability of CasΦ ortholog proteins. For this experiment, five different CasΦ polypeptides: designated CasΦ.2, CasΦ.11, CasΦ.17, CasΦ.18, and CasΦ.12 in FIG. 1, were analyzed. Amino acid sequences of the proteins used in the experiment are shown in TABLE 4.

[0443] All reactions were carried out using guide RNA comprising a crRNA sequence comprising the CasΦ.18 repeat sequence (ACCAAAACGACTATTGATTGCCCAGTACGCTGGGAC (SEQ ID NO: 57)). Complexing of the CasΦ polypeptide with a guide RNA to form the ribonucleoprotein (RNP) complex was carried out at room temperature for 20 minutes. The RNP complex was incubated with the target DNA at 37° C. for 60 minutes in NEB CutSmart buffer (50 mM Potassium Acetate, 20 mM Tris-Acetate, 10 mM Magnesium Acetate, 100 ug/ml BSA, pH 7.9 at 25° C.). The target nucleic acid used for the reactions was a super-coiled plasmid DNA comprising the target sequence TATTAAATACTCGTATTGCTGTTCGATTAT (SEQ ID NO: 116), which was immediately downstream of a TTTN PAM sequence. The plasmid DNA sequence is provided below with the target sequence in bold:

(SEQ ID NO: 1412)
gtgtagataactacgatacgggagggcttaccatctggccccagtgctgcaatgataccgcgagac
ccacgctcaccggctccagatttatcagcaataaaccagccagccggaagggccgagcgcagaagt
ggtcctgcaactttatccgcctccatccagtctattaattgttgccgggaagctagagtaagtagt
tcgccagttaatagtttgcgcaacgttgttgccattgctacaggcatcgtggtgtcacgctcgtcg
tttggtatggcttcattcagctccggttcccaacgatcaaggcgagttacatgatcccccatgttg
tgcaaaaaagcggttagctccttcggtcctccgatcgttgtcagaagtaagttggccgcagtgtta
tcactcatggttatggcagcactgcataattctcttactgtcatgccatccgtaagatgcttttct
gtgactggtgagtactcaaccaagtcattctgagaatagtgtatgcggcgaccgagttgctcttgc
ccggcgtcaatacgggataataccgcgccacatagcagaactttaaaagtgctcatcattggaaaa
cgttcttcggggcgaaaactctcaaggatcttaccgctgttgagatccagttcgatgtaacccact
cgtgcacccaactgatcttcagcatcttttactttcaccagcgtttctgggtgagcaaaaacagga
aggcaaaatgccgcaaaaaagggaataagggcgacacggaaatgttgaatactcatactcttcctt
tttcaatattattgaagcatttatcagggttattgtctcatgagcggatacatatttgaatgtatt
tagaaaaataaacaaataggggttccgcgcacatttccccgaaaagtgccacctgacgtctaagaa
accattattatcatgacattaacctataaaaataggcgtatcacgaggccctttcgtctcgcgcgt
ttcggtgatgacggtgaaaacctctgacacatgcagctcccggagacggtcacagcttgtctgcca
tggacatgtttaTATTAAATACTCGTATTGCTGTTCGATTATgaccgaattccctgtcgtgccagc
tgcattaatgaatcggccaacgcgcggggagaggcggtttgcgtattgggcgctcttccgcttcct
cgctcactgactcgctgcgctcggtcgttcggctgcggcgagcggtatcagctcactcaaaggcgg
taatacggttatccacagaatcaggggataacgcaggaaagaacatgtgagcaaaaggccagcaaa
aggccaggaaccgtaaaaaggccgcgttgctggcgtttttccataggctccgcccccctgacgagc
atcacaaaaatcgacgctcaagtcagaggtggcgaaacccgacaggactataaagataccaggcgt
ttccccctggaagctccctcgtgcgctctcctgttccgaccctgccgcttaccggatacctgtccg
cctttctcccttcgggaagcgtggcgctttctcatagctcacgctgtaggtatctcagttcggtgt
aggtcgttcgctccaagctgggctgtgtgcacgaaccccccgttcagcccgaccgctgcgccttat
ccggtaactatcgtcttgagtccaacccggtaagacacgacttatcgccactggcagcagccactg
gtaacaggattagcagagcgaggtatgtaggcggtgctacagagttcttgaagtggtggcctaact
acggctacactagaagaacagtatttggtatctgcgctctgctgaagccagttaccttcggaaaaa
gagttggtagctcttgatccggcaaacaaaccaccgctggtagcggtggtttttttgtttgcaagc
agcagattacgcgcagaaaaaaaggatctcaagaagatcctttgatcttttctacggggtctgacg
ctcagtggaacgaaaactcacgttaagggattttggtcatgagattatcaaaaaggatcttcacct
agatccttttaaattaaaaatgaagttttaaatcaatctaaagtatatatgagtaaacttggtctg
acagttaccaatgcttaatcagtgaggcacctatctcagcgatctgtctatttcgttcatccatag
ttgcctgactccccgtc

[0444] As shown in FIG. 1, CasΦ.17 and CasΦ.18 produced only nicked product (i.e. single strand breaks; “nicked”) by 60 minutes. By way of comparison, CasΦ.12 generated almost entirely linearized product demonstrating double-stranded breaks, while CasΦ.2 and CasΦ.11 generated some linearized product (i.e. double strand breaks) but primarily produced nicked intermediate. This data demonstrates that CasΦ orthologs can comprise programmable nickase activity.

### Example 4

[0445] Effect of crRNA Repeat Sequence and RNP Complexing Temperature on CasΦ Nickase Activity

[0446] The present example shows that the crRNA repeat sequence and RNP complexing temperature can affect nickase activity of CasΦ. FIG. 2A and FIG. 2B illustrate results of a cis-cleavage experiment showing the percentage of input plasmid DNA that was nicked after 60 minutes of reaction at 37° C. by CasΦ RNP complex assembled at room temperature (FIG. 2A) or at 37° C. (FIG. 2B). FIG. 2C illustrates alignment of CasΦ.2, CasΦ.7, CasΦ.10, and CasΦ.18 repeat sequences showing conserved (highlighted in black) and diverged nucleotides.

[0447] For this study, each of three CasΦ polypeptides (CasΦ.11, CasΦ.17 and CasΦ.18 in FIGS. 2A and 2B) was tested for their ability to nick input plasmid DNA when complexed with one of four crRNAs comprising the repeat sequences of CasΦ.2, CasΦ.7, CasΦ.10 and CasΦ.18 (abbreviated j2, j7, j10 and j18, respectively in FIG. 2A and FIG. 2B). Amino acid sequences of the proteins used in the experiment are shown in TABLE 4. Guide RNA sequences corresponding to j2, j7, j10 and j18 are provided in TABLE 5. The input plasmid was a super-coiled plasmid (sequence shown in EXAMPLE 3) comprising the target sequence TATTAAATACTCGTATTGCTGTTCGATTAT (SEQ ID NO: 108) immediately downstream of a TTTN PAM. The incubation reaction to form the RNP complex was performed either at room temperature or at 37° C. for 60 minutes in NEB CutSmart buffer (50 mM Potassium Acetate, 20 mM Tris-Acetate, 10 mM Magnesium Acetate, 100 ug/ml BSA, pH 7.9 at 25° C.). The RNP complex was incubated with the input plasmid for 60 minutes at 37° C. The reaction was quenched with 1 mg/ml proteinase K, 0.08% SDS, and 15 mM EDTA. The data illustrated in FIG. 2A and FIG. 2B comes from a single replicate of the in vitro cis-cleavage experiment.

[0448] As shown in FIG. 2A, when the CasΦ polypeptides were assembled into RNP complexes with the guide nucleic acids at room temperature, crRNAs comprising repeat sequences from any of the proteins supported nickase activity by CasΦ.11, CasΦ.17 and CasΦ.18, with the exception of the CasΦ.17/CasΦ.2-repeat pairing. As shown in FIG. 2B, when the CasΦ polypeptides were assembled into RNP complexes with the guide nucleic acids at 37° C., as opposed to at room temperature, the activity of each protein was completely abolished when complexed with crRNAs comprising a repeat sequence from CasΦ.2 or CasΦ.10.

[0449] This example showed that the nickase activity of CasΦ can be affected by the crRNA repeat sequence. The data also showed that the nickase activity of CasΦ can be affected by the RNP complexing temperature.

[0450] FIG. 2D provides further examples of the nickase activity of CasΦ affected by the RNP complexing temperature. Nickase activity was assessed as described above for CasΦ.2, CasΦ.4, CasΦ.6, CasΦ.9, CasΦ.10, CasΦ.12 and CasΦ.13. Amino acid sequences of the proteins used in the experiment are shown in TABLE 1.

[0451] The effect of complexing temperature on the double strand cutting activity of CasΦ polypeptides was also assessed as described above. As shown in FIG. 2D, generally the double strand cutting activity of CasΦ polypeptides, particularly CasΦ.2, CasΦ.4 and CasΦ.12, is not affected by the RNP complexing temperature. Although some systems with less efficient double strand cutting activity, such as CasΦ.10, CasΦ.11 and CasΦ.13 in this example, are sensitive to RNP complexing temperature.

### Example 5

[0452] CasΦ Nickase Cleaves Non-Target Strand

[0453] The present example shows that CasΦ nickase cleaves the non-target DNA strand. Results of the study are shown in FIG. 3. For this study, four different CasΦ polypeptides (CasΦ.12, CasΦ.2, CasΦ.11, and CasΦ.18 as shown in FIG. 1) were analyzed using a cis-cleavage assay. Amino acid sequences of the proteins used in the experiment are shown in TABLE 4. The CasΦ polypeptides were complexed with guide RNA to form RNP complexes All reactions were carried out using guide RNA comprising a crRNA sequence comprising the CasΦ.18 repeat sequence (ACCAAAACGACTATTGATTGCCCAGTACGCTGGGAC (SEQ ID NO: 57)). Complexing of the CasΦ polypeptides with guide RNA to form the ribonucleoprotein (RNP) complex was carried out at room temperature for 20 minutes. The RNP complex was incubated with the target DNA at 37° C. for 60 minutes in NEB CutSmart buffer (50 mM Potassium Acetate, 20 mM Tris-Acetate, 10 mM Magnesium Acetate, 100 ug/ml BSA, pH 7.9 at 25° C. The target nucleic acid used for the reactions was a super-coiled plasmid DNA (sequence shown in EXAMPLE 3) comprising the target sequence TATTAAATACTCGTATTGCTGTTCGATTAT (SEQ ID NO: 116), which was immediately downstream of a TTTN PAM sequence. The reaction was quenched with 1 mg/ml proteinase K, 0.08% SDS, and 15 mM EDTA. The resulting cleaved DNA from the reaction was Sanger sequenced using forward and reverse primers. The forward primer provided the sequence of the target strand (TS), while the reverse primer provided the sequence of the non-target strand (NTS). If a strand had been cleaved by the CasΦ polypeptide, the sequencing signal would drop off from the cleavage site in the sequencing data. FIG. 3 illustrates results of the Sanger sequencing.

[0454] FIG. 3, panel A, shows a control reaction where no CasΦ polypeptide was added. As a result, the target DNA was uncut and resulted in complete sequencing of both target and non-target strands. FIG. 3, panel B, illustrates the cleavage pattern for CasΦ.12, which comprises double-stranded DNA cleavage activity. The sequencing signal dropped off on both the target and the non-target strands (as shown by arrows), demonstrating cleavage of both strands of the target DNA. FIG. 3, panel C, illustrates the cleavage pattern for CasΦ.2, which predominantly nicks DNA (as illustrated in FIG. 1). The data showed that the sequencing signal dropped off on only the non-target strand (bottom arrow) demonstrating cleavage of the non-target strand. FIG. 3, panel D, illustrates the cleavage pattern for CasΦ.11, which comprises strong nickase activity (as illustrated in FIG. 1). The data showed that the sequencing signal dropped off on only the non-target strand (bottom arrow) demonstrating cleavage of the non-target strand. FIG. 3, panel E, illustrates the cleavage pattern for CasΦ.18, which comprises strong nickase activity (as illustrated in FIG. 1). The data showed that the sequencing signal dropped off on only the non-target strand (bottom arrow) demonstrating cleavage of the non-target strand. Thus, this example shows that CasΦ polypeptides comprising nickase activity cleave the non-target strand of a target DNA.

### Example 6

[0455] Editing a Target Nucleic Acid

[0456] This example describes genetic modification of a target nucleic acid with a programmable CasΦ nuclease (e.g., any one of SEQ ID NO: 1-SEQ ID NO: 47, SEQ ID NO: 105 or SEQ ID NO: 107) of the present disclosure. The programmable CasΦ nuclease is administered with a guide nucleic acid capable of hybridizing to a segment of a target nucleic acid sequence of interests in a ribonucleoprotein complex or as separate nucleic acids encoding for each component. Subjects administered said composition are humans or non-human mammals. Upon binding of the guide nucleic acid to the segment of the target nucleic acid, the programmable CasΦ nuclease nicks or induces a double stranded break in the target. The target undergoes NHEJ or HDR. A donor nucleic acid may be co-administered. The donor nucleic acid may be to replace or repair a mutated segment of the target nucleic acid. The subject may have a disease. Upon genetic modification of the target nucleic acid, the disease or a symptom of the disease may be alleviated, or the disease may be cured.

### Example 7

[0457] Editing a Plant or Crop Target Nucleic Acid

[0458] This example describes genetic modification of a plant or crop target nucleic acid with a programmable CasΦ nuclease (e.g., any one of SEQ ID NO: 1-SEQ ID NO: 47, SEQ ID NO: 105 or SEQ ID NO: 107) of the present disclosure. The programmable CasΦ nuclease is administered with a guide nucleic acid capable of hybridizing to a segment of a target nucleic acid sequence of interests in a ribonucleoprotein complex or as separate nucleic acids encoding for each component. Subjects administered said composition are plant or crop cells. Upon binding of the guide nucleic acid to the segment of the target nucleic acid, the programmable CasΦ nuclease nicks or induces a double stranded break in the target. The target undergoes NHEJ or HDR. A donor nucleic acid may be co-administered. The donor nucleic acid may be to replace or repair a mutated segment of the target nucleic acid. The result is an engineered plant or crop cell.

### Example 8

[0459] Genetic Modification of a Target Nucleic Acid

[0460] This example describes genetic modification of a target nucleic acid with a dead programmable CasΦ nuclease (e.g., any one of SEQ ID NO: 1-SEQ ID NO: 47, SEQ ID NO: 105 or SEQ ID NO: 107 with a mutation rendering it catalytically inactive) of the present disclosure. The programmable CasΦ nuclease is further linked to a transcriptional regulator. The programmable CasΦ nuclease, the transcriptional regulator, and the guide nucleic acid capable of hybridizing to a segment of a target nucleic acid sequence of interests are administered as a ribonucleoprotein complex or as separate nucleic acids encoding for each component. Subjects administered said composition are humans or non-human mammals. Upon binding of the guide nucleic acid to the segment of the target nucleic acid, the dead programmable CasΦ nuclease upregulates or downregulates transcription. The subject may have a disease. Upon genetic modification of the target nucleic acid, the disease or a symptom of the disease may be alleviated, or the disease may be cured.

### Example 9

[0461] Genetic Modification of a Plant of Crop Target Nucleic Acid

[0462] This example describes genetic modification of a plant or crop target nucleic acid with a dead programmable CasΦ nuclease (e.g., any one of SEQ ID NO: 1-SEQ ID NO: 47, SEQ ID NO: 105 or SEQ ID NO: 107 with a mutation rendering it catalytically inactive) of the present disclosure. The programmable CasΦ nuclease is further linked to a transcriptional regulator. The programmable CasΦ nuclease, the transcriptional regulator, and the guide nucleic acid capable of hybridizing to a segment of a target nucleic acid sequence of interests are administered as a ribonucleoprotein complex or as separate nucleic acids encoding for each component. Subjects administered said composition are humans or non-human mammals. Upon binding of the guide nucleic acid to the segment of the target nucleic acid, the dead programmable CasΦ nuclease upregulates or downregulates transcription. The result is an engineered plant or crop cell.

### Example 10

[0463] Detection of a Target Nucleic Acid

[0464] This example describes detection of a target nucleic acid with a programmable CasΦ nuclease (e.g., any one of SEQ ID NO: 1-SEQ ID NO: 47, SEQ ID NO: 105 or SEQ ID NO: 107) of the present disclosure. The programmable CasΦ nuclease, the guide nucleic acid capable of hybridizing to a segment of a target nucleic acid sequence of interests, and a labeled ssDNA reporter are contacted to a sample. In the presence of the target nucleic acid in the sample, the guide nucleic acid binds to its target, thereby activating the programmable CasΦ nuclease to cleave the labeled ssDNA reporter and releasing a detectable label. The detectable label emits a detectable signal that is, optionally, quantified. In the absence of the target nucleic acid in the sample, the guide nucleic acid does not bind to its target, the labeled ssDNA reporter is not cleaved, and low or no signal is detected.

### Example 11

[0465] Preference for Nicking or Double Strand Cleavage of Target DNA is a Property of CasΦ Enzymes, Independent of crRNA Repeat or Target Sequences

[0466] This example describes how the preference of a CasΦ polypeptide to cleave a single or both strands of a double-strand target DNA is independent of the crRNA repeat or target sequence. For this study, each of twelve CasΦ polypeptide (CasΦ.1, CasΦ.2, CasΦ.3, CasΦ.4, CasΦ.6, CasΦ.9, CasΦ.10, CasΦ.11, CasΦ.12, CasΦ.13, CasΦ.17 and CasΦ.18) was complexed with one of the crRNAs comprising the repeat sequences of CasΦ.1, CasΦ.2, CasΦ.4, CasΦ.7, CasΦ.10, CasΦ.11, CasΦ.12, CasΦ.13, CasΦ.17 and CasΦ.18. Amino acid sequences of the proteins used in the experiment are shown in TABLE 1 and crRNA sequences are provided in TABLE 2. The input plasmid was one of two super-coiled plasmids containing a target sequence (TATTAAATACTCGTATTGCTGTTCGATTAT (SEQ ID NO: 108) or CACAGCTTGTCTGTAAGCGGATGCCATATG (SEQ ID NO: 109)) immediately downstream of a TTTN PAM. The incubation reaction to form the RNP complex was performed at room temperature for 20 minutes in NEB CutSmart buffer (50 mM Potassium Acetate, 20 mM Tris-Acetate, 10 mM Magnesium Acetate, 100 ug/ml BSA, pH 7.9 at 25° C.). The RNP complex was incubated with the input plasmid for 60 minutes at 37° C. The reaction was quenched with 1 mg/ml proteinase K, 0.08% SDS, and 15 mM EDTA.

[0467] As shown in FIG. 4A, CasΦ polypeptides have a preference for nicking or linearizing (i.e. cleaving both strands) a double strand plasmid DNA target and this preference is not affected by the crRNA repeat or target DNA sequence.

[0468] Raw data used to generate a subset of the heatmap in FIG. 4A is shown in FIG. 4B. These data show that CasΦ.12 is predominantly a linearizer of plasmid DNA, i.e. CasΦ.12 predominantly cleaves both strands of a double strand target DNA. Whereas CasΦ.18 is predominantly a nickase and predominantly cleaves one strand of a double strand target DNA.

[0469] This example showed that the preference of a CasΦ polypeptide to cleave a single or both strands of a double-strand target DNA is independent of the crRNA repeat or target sequence.

### Example 12

[0470] Structural Conservation Across the CasΦ Repeats

[0471] This example describes the conservation of structure across the CasΦ repeats. In particular, FIG. 5A shows the structure of the crRNA repeats for CasΦ.1, CasΦ.2, CasΦ.7, CasΦ.11, CasΦ.12, CasΦ.13, CasΦ.18, and CasΦ.32. crRNA sequences are provided in TABLE 2. There is high sequence and structure conservation in the 3′ half of the CasΦ repeats. The LocARNA alignment tool was used to confirm the consensus structure of CasΦ repeats, which is shown in FIG. 5B. The consensus was determined on the basis of the following crRNA repeats: CasΦ.1, CasΦ.2, CasΦ.4, CasΦ.7, CasΦ.10, CasΦ.11, CasΦ.12, CasΦ.13, Cas12Φ.17, CasΦ.18, CasΦ.19, CasΦ.21, CasΦ.22, CasΦ.23, CasΦ.24, CasΦ.25, CasΦ.26, CasΦ.27, CasΦ.28, CasΦ.29, CasΦ.30, CasΦ.31, CasΦ.32, CasΦ.33, CasΦ.35, CasΦ.41. The sequence of these repeats is provided in TABLE 5. As shown in FIG. 5B, CasΦ repeats have a highly conserved 3′ hairpin which includes a double stranded stem portion and a single-stranded loop portion. One strand of the stem includes the sequence CYC and the other strand includes the sequence GRG, where Y and R are complementary. The loop portion typically comprises four nucleotides. The 3′ end of CasΦ repeats comprise the sequence GAC and the G of this sequence is in the stem of the hairpin.

[0472] This example shows the conserved structure of CasΦ crRNA repeats.

### Example 13

[0473] CasΦ PAM Preferences on Linear Targets

[0474] The present example shows the PAM preferences for CasΦ polypeptides on linear double stranded DNA targets. For this study, five different CasΦ polypeptides (CasΦ.2, CasΦ.4, CasΦ.11, CasΦ.12 and CasΦ.18) were analyzed using a cis-cleavage assay. Amino acid sequences of the proteins used are shown in TABLE 1. The CasΦ polypeptides were complexed their native crRNAs (i.e. the corresponding CasΦ.2, CasΦ.4, CasΦ.11, CasΦ.12 and CasΦ.18 repeats) to form RNP complexes at room temperature for 20 minutes. The RNP complex was incubated with target DNA at 37° C. for 60 minutes in NEB CutSmart buffer (50 mM Potassium Acetate, 20 mM Tris-Acetate, 10 mM Magnesium Acetate, 100 ug/ml BSA, pH 7.9 at 25° C.). The target DNA was a 1.1 kb PCR-amplified DNA product. Stating with a TTTA PAM, each position was varied one by one to the other 3 nucleotides for a total of 12 variants in addition to the parental TTTA PAM. Linear fragments were used to disfavor cleavage for greater sensitivity of PAM preference determination. FIG. 6A illustrates the absolute levels of double strand cleavage (or nicking for CasΦ.18). FIG. 6B illustrates the data from FIG. 6A after normalization to the parental TTTA PAM as 100%. FIG. 6C provides a summary of the optimal PAM preferences from the data in FIG. 6A and FIG. 6B. CasΦ.2 recognizes a GTTK PAM, where K is G or T. CasΦ.4 recognizes a VTTK PAM, where V is A, C or G and K is G or T. CasΦ.11 recognizes a VTTS PAM, where V is A, C or G and S is C or G. CasΦ.12 recognizes a TTTS PAM, where S is C or G. CasΦ.18 recognizes a VTTN PAM, where V is A, C or G and N is A, C, G or T.

[0475] This example shows the optimized PAM preferences for some of the CasΦ polypeptides.

### Example 14

[0476] CasΦ Polypeptides Rapidly Nick Supercoiled DNA

[0477] The present example shows that CasΦ polypeptides rapidly nick supercoiled DNA but vary in their ability to deliver the second strand cleavage. For this study, five different CasΦ polypeptides (CasΦ.2, CasΦ.4, CasΦ.11, CasΦ.12 and CasΦ.18) were analyzed using a cis-cleavage assay. Amino acid sequences of the proteins used are shown in TABLE 1. The CasΦ polypeptides were complexed with their native crRNA to form 200 nM RNP complexes at room temperature in NEB CutSmart buffer (50 mM Potassium Acetate, 20 mM Tris-Acetate, 10 mM Magnesium Acetate, 100 ug/ml BSA, pH 7.9 at 25° C.) for 20 minutes in a volume of 30 μl. The target plasmid was one of two 2.2 kb super-coiled plasmids containing a target sequence

(TATTAAATACTCGTATTGCTGTTCGATTAT (SEQ ID NO: 108)
or
CACAGCTTGTCTGTAAGCGGATGCCATATG (SEQ ID NO: 109),

[0478] the guide RNAs targeted the underlined sequence) immediately downstream of a GTTG or TTTG PAM. At time “0” 30 μl of 20 nM target plasmid was mixed with RNP for a total volume of 60 μL The incubation temperature was 37° C. At 1, 3, 6, 15, 30 and 60 minutes, 9 μl portions of the reaction were withdrawn and stopped with reaction quench (1 mg/ml proteinase K, 0.08% SDS and 15 mM EDTA) and allowed to deproteinize for 30 minutes at 37° C. before agarose gel analysis. The cleavage was quantified as nicked or linear. FIG. 7 shows the rapid nicking of supercoiled target DNA by CasΦ polypeptides. The decrease in nicked products over time is due to the formation of linear product as the CasΦ polypeptides cleaves the second strand of the target DNA. CasΦ.12 rapidly cleaves both strands of supercoiled DNA.

[0479] This example shows that CasΦ polypeptides rapidly nick supercoiled DNA.

### Example 15

[0480] Cas0 Polypeptides Prefers Full Length Repeats and Spacers Form 16-20 Nucleotide

[0481] The present example shows that CasΦ polypeptides prefer full-length repeats and spacers from 16 to 20 nucleotides. For this study, each of five CasΦ polypeptides (CasΦ.2, CasΦ.4, CasΦ.11, CasΦ.12 and CasΦ.18 in FIGS. 8A and 8B) was tested for their ability to cleave input plasmid DNA when complexed with one of either of the crRNAs comprising the repeat sequences of CasΦ.2 or CasΦ.18 (abbreviated j2 and j 18, respectively in FIG. 8A and FIG. 8B). Amino acid sequences of the proteins used in the experiment are shown in TABLE 1. Guide RNA sequences corresponding to j2 and j 18 are provided in TABLE 2. The CasΦ polypeptides were complexed to the crRNA in NEB CutSmart Buffer (50 mM Potassium Acetate, 20 mM Tris-Acetate, 10 mM Magnesium Acetate, 100 ug/ml BSA, pH 7.9 at 25° C.) for 20 minutes at room temperature. The ability of the CasΦ polypeptides to cleave a 2.2 kb plasmid containing a target sequence was assessed (FUT8_1: ACGCGTTTTAGAAGAGCAGCTTGTTAAGGCCAAAGAACAGATTGA (SEQ ID NO: 1413) and DNMT_1: AAAGATTTGTCCTTGGAGAACGGTGCTCATGCTTACAACCGGGA (SEQ ID NO: 1414), the PAM is underlined). Spacers targeting these target sequences were shortened from the 3′ end. The cleavage incubation was at 37° C. and the reaction was quenched after 10 minutes with 1 mg/ml proteinase K, 0.08% SDS and 15 mM EDTA. To assess the effect of shortening the crRNA repeats, the repeats were shortened from the 5′ end.

[0482] As shown in FIG. 8A, cRNA repeats with a length of 19 to 37 nucleotides supported cleavage activity of CasΦ polypeptides.

[0483] As shown in FIG. 8B, cleavage activity was observed over the range of spacer lengths tested (16 to 35 nucleotides). The optimal spacer length to support the cleavage activity of CasΦ polypeptides in this in vitro system is 16 to 20 nucleotides.

[0484] This example shows that CasΦ polypeptides prefer crRNA repeat lengths of 19 to 37 nucleotides and spacer lengths of 16 to 20 nucleotides in vitro.

### Example 16

[0485] Cas40.12 Spacer Length Optimization in HEK293T Cells

[0486] The present example shows the use of CasΦ.12 as a gene editing tool in HEK293T cells and the effect of changing the length of the spacer. As illustrated in the schematic in FIG. 9A, a stable HEK293T cell line that expresses AcGFP was established. A plasmid expressing the crRNA under the control of the U6 promoter and CasΦ.12 under the control of the EFla promoter was transfected into the AcGFP-expressing HEK293T cell line. The CasΦ.12 was expressed as FLAGtag-SV40NLS-Cas12j.12-NLS-T2A-PuroR. GFP expression was assessed by flow cytometry at days 5, 7 and 10. The 30 nucleotide spacer sequence is 5′-TTGCCCAGGATGTTGCCATCCTCCTTGAAA-3′ (SEQ ID NO: 1415). To assess the effect of different spacer length, the spacer was shortened from its 3′ end. As shown in FIG. 9B, a spacer length of 15 to 30 nucleotides supported CasΦ.12 cleavage activity in HEK293T cells, but with less cleavage detected with the 15 and 16 nucleotide spacers. There is a preference for CasΦ.12 to have a spacer length of 17 to 22 nucleotides, but cleavage activity is still supported with the longer spacers tested.

### Example 17

[0487] CasΦ Nucleases are a Novel Class of Protein

[0488] This example illustrates that the CasΦ nucleases identified herein are a novel class of Cas proteins. SEQ ID NOs: 1 to 47 and SEQ ID NO. 105 were searched in the InterPro database, but were not identified as belonging to a class of protein. As an example, the results for SEQ ID NO: 2 are shown in FIG. 10A. As a positive control, the Cpf1 sequence from Acidaminococcus sp. (strain BV3L6) was also searched and was identified as a CRISPR-associated endonuclease Cas12a family member, as shown in FIG. 10B.

### Example 18

[0489] DNA Cleavage by CasΦ.19-CasΦ.48

[0490] This example illustrates the DNA cleavage activity of CasΦ.19 to CasΦ.45. Amino acid sequences of the proteins used in the experiment are shown in TABLE 1. The CasΦ polypeptides were complexed with their native crRNA (or the crRNA of the CasΦ polypeptide with the closest match based on amino acid sequence identity) to form 100 nM RNP complexes at room temperature in NEB CutSmart buffer (50 mM Potassium Acetate, 20 mM Tris-Acetate, 10 mM Magnesium Acetate, 100 ug/ml BSA, pH 7.9 at 25° C.) for 20 minutes in a volume of 30 μl. crRNA sequences are provided in TABLE 2. The target plasmid was a 2.1 kb plasmid containing the target sequence

(SEQ ID NO: 108)
TATTAAATACTCGTATTGCTGTTCGATTAT.

The cleavage incubation was performed at 37° C. and the reaction was quenched after 60 minutes. Cleavage products where then analyzed by gel electrophoresis, as shown in FIG. 13A. This analysis identifies CasΦ.20, CasΦ.22, CasΦ.24, CasΦ.25, CasΦ.28, CasΦ.31, CasΦ.32, CasΦ.37, CasΦ.43 and CasΦ.45 as enzymes that predominantly linearize plasmid DNA, i.e. they predominantly cleave both strands of a double strand target DNA. Whereas DNA cleavage by CasΦ.21 results in mixed nicked and linear product, indicating that CasΦ.21 functions as a nickase as well as a linearizer of plasmid DNA with a preference for nickase activity under the conditions of the present study. Mixed nicked and linearized cleavage products were also identified following cleavage by CasΦ.26, CasΦ.29, CasΦ.33, CasΦ.34, CasΦ.38 and CasΦ.44. ‘SC’ represents ‘super-coiled’ un-cut target plasmid.

[0491] This example shows robust DNA cleavage by CasΦ polypeptides.

[0492] The inventors went on to demonstrate the robust generation of indels following targeting by CasΦ.12, CasΦ.20, CasΦ.21, CasΦ.22, CasΦ.25, CasΦ.28, CasΦ.31, CasΦ.32, CasΦ.33, CasΦ.34, CasΦ.37, CasΦ.43, and CasΦ.45. A stable HEK293T cell line that expresses AcGFP was established. HEK293T-AcGFP cells were transfected with crRNA and CasΦ expression plasmids using lipofectamine on day 0. Target sequences are provided in TABLE 6. Cells were harvested by trypsinization on day 3 for TIDE analysis. The target locus was amplified by PCR and the amplified product was then sequenced using Sanger sequencing. The TIDE analysis provides the frequency of indel mutations (https://tide.nki.nl/#about). As shown in FIG. 13B, targeting CasΦ.12, CasΦ.20, CasΦ.21, CasΦ.22, CasΦ.25, CasΦ.28, CasΦ.31, CasΦ.32, CasΦ.33, CasΦ.34, CasΦ.37, CasΦ.43, and CasΦ.45 to AcGFP led to the robust generation of indel mutations. FIG. 13C provides an alternative representation of the data shown in FIG. 13B for CasΦ.12, CasΦ.28, CasΦ.31, CasΦ.32 and CasΦ.33. These data further demonstrate the genome editing ability of CasΦ.20, CasΦ.21, CasΦ.22, CasΦ.25, CasΦ.28, CasΦ.31, CasΦ.32, CasΦ.33, CasΦ.34, CasΦ.37, CasΦ.43, and CasΦ.45.

TABLE 6

| | | PAM | PAM | SEQ ID |
|---|---|---|---|---|
| | Target Sequence | eGFP | acGFP | NO |
| KT_eGFP | TTAAGGCCAAAGAACAGATT | CTTG | CTTG | 1416 |
| OT_eGFP | CGTGATGGTCTCGATTGAGT | None | None | 1417 |
| T1_eGFP | AAGAAGTCGTGCTGCTTCAT | CTTG | CTTG | 1418 |
| T2_eGFP | ATCTGCACCACCGGCAAGCT | GTTC | GTTC | 1419 |
| T3_eGFP | TGGCGGATCTTGAAGTTCAC | GTTG | GTTG | 1420 |
| T4_eGFP | CCGTAGGTGGCATCGCCCTC | GTTC | CTTC | 1421 |
| T5_eGFP | ACGTCGCCGTCCAGCTCGAC | GTTT | None | 1422 |
| T6_eGFP | AAGAAGATGGTGCGCTCCTG | CTTG | CTCG | 1423 |

### Example 19

[0493] PAM Requirement for Castro Determined by In Vitro Enrichment

[0494] This example illustrates the NTTN PAM requirement for CasΦ.2, CasΦ.4, CasΦ.11 and CasΦ.12. An in vitro enrichment (IVE) analysis was performed. The CasΦ polypeptides were complexed with crRNA to form 500 nM RNP complexes at room temperature in NEB CutSmart buffer (50 mM Potassium Acetate, 20 mM Tris-Acetate, 10 mM Magnesium Acetate, 100 ug/ml BSA, pH 7.9 at 25° C.) for 30 minutes in a volume of 25 crRNA sequences are provided in TABLE 2. The cleavage incubation was performed at 37° C. and the reaction was quenched after 30 minutes. The substrate for the cleavage incubation was a pooled plasmid library which includes different PAM sequences. After quenching, the cleavage reactions were cleaned using Beckman SPRi beads. The samples were sequenced to identify which PAM sequences enabled target cleavage by the CasΦ polypeptides. As shown in FIG. 14A, this analysis revealed an NTTN PAM requirement for CasΦ.2, CasΦ.4, CasΦ.11 and CasΦ.12.

[0495] The inventors went on to assess the PAM requirement of CasΦ.20, CasΦ.26, CasΦ.32, CasΦ.38 and CasΦ.45. An IVE analysis was performed using the protocol described above for CasΦ.2, CasΦ.4, CasΦ.11 and CasΦ.12. As shown in FIG. 14B, Sanger sequencing revealed a NTNN PAM requirement for CasΦ.20, a NTTG PAM requirement for CasΦ.26, a GTTN PAM requirement for CasΦ.32 and CasΦ.38, and a NTTN PAM requirement for CasΦ.45.

[0496] The inventors also determined a single-base PAM requirement for CasΦ.20, CasΦ.24 and CasΦ.25. Amino acid sequences of the proteins used are shown in TABLE 1. The CasΦ polypeptides were complexed with their native crRNAs to form RNP complexes at room temperature for 20 minutes. crRNA sequences are provided in TABLE 2. The RNP complexes were incubated with target DNA at 37° C. for 60 minutes in NEB CutSmart buffer (50 mM Potassium Acetate, 20 mM Tris-Acetate, 10 mM Magnesium Acetate, 100 ug/ml BSA, pH 7.9 at 25° C.). The RNPs were then used in cleavage reactions with plasmid DNA comprising a target sequence and a PAM. Stating with a TTTg PAM, the PAM was mutated to each of the sequences shown in FIG. 14C to assess the PAM requirement. The products of the cleavage reactions were analyzed by gel electrophoresis, as seen in FIG. 14C. FIG. 14D provides the quantification of the gels shown in FIG. 14C. Together, the data in FIG. 14C and FIG. 14D demonstrate a NTNN PAM for DNA cleavage by CasΦ.20, CasΦ.24 and CasΦ.25.

[0497] This example demonstrates PAM sequences that enable CasΦ polypeptides to be targeted to a target sequence.

### Example 20

[0498] CasΦ-Mediated Genome Editing in HEK293T Cells

[0499] This example illustrates the ability of CasΦ polypeptides to mediate genome editing in HEK293T cells, a cell line which is widely used in biological research. In this study, a CasΦ.12 plasmid, including both CasΦ polypeptide sequence and gRNA sequence, sometimes called an all-in-one, was delivered via lipofection. Spacers targeted exon 4 of the Fut8 gene. The spacer sequences are provided in TABLE 7. Cells were transfected on day 0 and harvested for analysis on day 5. As shown in FIG. 15, the target locus was modified following delivery of CasΦ.12 and gRNA 2. Cas9 was delivered to HEK293T cells to provide a positive control and no modification was detected when a non-targeting (NT) gRNA was used. The presence of indels was confirmed by next generation sequence analysis. The sample targeted by CasΦ.12 and gRNA 2 is shown in FIG. 15. The next generation sequence analysis revealed a diverse pattern of indels. The most frequent mutations were deletion mutations of 4 to 18 base pairs. The frequency of mutations was quantified and is illustrated as “% modified”, which is defined as the % of modification in the DNA sequence when aligned to unedited cells. Modifications can be deletions, insertions and substitutions.

[0500] This example demonstrates the use of CasΦ.12 as a robust genome editing tool.

TABLE 7

| | | Spacer sequence |
|---|---|---|
| Name | Target | (5′->3′) [SEQ ID NO] |
| Fut8_1 | CasPhi target | GAAGAGCAGCTTGTTAAGGC |
| | | (SEQ ID NO: 1424) |
| Fut8_2 | CasPhi target | GCCTTAACAAGCTGCTCTTC |
| | | (SEQ ID NO: 1425) |
| Fut8_3 | Cas9 target | ATTGATCAGGGGCCAgctat |
| | (control) | (SEQ ID NO: 1426) |
| Fut8_4 | Cas9 target | Acgcgtactcttcctatagc |
| | (control) | (SEQ ID NO: 1427) |
| Nt | Non target | CGTGATGGTCTCGATTGAGT |
| | | (SEQ ID NO: 1428) |

### Example 21

[0501] CasΦ-Mediated Genome Editing in CHO Cells

[0502] This example illustrates the ability of CasΦ polypeptides to mediate genome editing in CHO cells, an epithelial cell line which is frequently used in biological and medical research. To test the function of CasΦ.12 in CHO cells, 40 pmol CasΦ.12 was complexed to its native crRNA (2.5:1 crRNA:CasΦ). To prepare a mastermix of CasΦ.12 RNP, 3 μl crRNA (at 100 nM) was added to 1.6 μl CasΦ.12 (at 75 μM). Spacer sequences are provided in Table 8. The RNP complexes were incubated at 37° C. for 30 minutes. CHO cells were resuspended at 1.2×10⁶ cells/ml in SF solution (Lonza). 40 μl of the cell suspension was added to the RNP complexes and 20 ul of the resultant suspension was then transferred to individual tubes for nucleofection. Lonza setting FF-137 was used to nucleofect the CHO cells. Cells were then harvested for analysis on day 5. As shown in FIG. 16A, CasΦ.12 induced the generation of indels in each of the endogenous genes tested (Bak1, Bax and Fut8). The ability of CasΦ.12 to induce indel mutations in each of these genes is further shown in FIG. 16F for Bak1, FIG. 16G for Bax and FIG. 16H for Fut8. Spacer sequences for FIG. 16F, FIG. 16G and FIG. 16H are provided in Tables F, G, and H, respectively. The data shown in FIG. 16F-H were produced with 200,000 CHO cells per transfection, RNP complexed with 250 pmol of CasΦ.12, and full-length unmodified guide RNA in molar excess relative to CasΦ.12, using the same Lonza reagents described for producing data presented in FIGS. 16A-E.

TABLE 8

| | Spacer sequence | Repeat+Spacer sequence |
|---|---|---|
| Name | (5′->3′) | (5′->3′), shown as DNA |
| Bak1_1 | GAAGCTATGTTTTCCAT | CTTTCAAGACTAATAGATTGCTCCTTACGA |
| | CTC (SEQ ID NO: 443) | GGAGACGAAGCTATGTTTTCCATCTC (SEQ |
| | | ID NO: 1197) |
| Bak1_2 | GCAGGGGCAGCCGCCC | CTTTCAAGACTAATAGATTGCTCCTTACGA |
| | CCTG | GGAGACGCAGGGGCAGCCGCCCCCTG |
| | (SEQ ID NO: 444) | (SEQ ID NO: 1198) |
| Bak1_3 | CTCCTAGAACCCAACA | CTTTCAAGACTAATAGATTGCTCCTTACGA |
| | GGTA | GGAGACCTCCTAGAACCCAACAGGTA |
| | (SEQ ID NO: 445) | (SEQ ID NO: 1199) |
| Bak1_4 | GAAAGACCTCCTCTGTG | CTTTCAAGACTAATAGATTGCTCCTTACGA |
| | TCC (SEQ ID NO: 446) | GGAGACGAAAGACCTCCTCTGTGTCC (SEQ |
| | | ID NO: 1200) |
| Bak1_5 | TCCATCTCGGGGTTGGC | CTTTCAAGACTAATAGATTGCTCCTTACGA |
| | AGG (SEQ ID NO: 447) | GGAGACTCCATCTCGGGGTTGGCAGG |
| | | (SEQ ID NO: 1201) |
| Bak1_6 | TTCCTGATGGTGGAGAT | CTTTCAAGACTAATAGATTGCTCCTTACGA |
| | GGA (SEQ ID NO: 448) | GGAGACTTCCTGATGGTGGAGATGGA |
| | | (SEQ ID NO: 1202) |
| Bax_1 | CTAATGTGGATACTAAC | CTTTCAAGACTAATAGATTGCTCCTTACGA |
| | TCC (SEQ ID NO: 479) | GGAGACCTAATGTGGATACTAACTCC (SEQ |
| | | ID NO: 1269) |
| Bax_2 | TTCCGTGTGGCAGCTGA | CTTTCAAGACTAATAGATTGCTCCTTACGA |
| | CAT (SEQ ID NO: 480) | GGAGACTTCCGTGTGGCAGCTGACAT (SEQ |
| | | ID NO: 1270) |
| Bax_3 | CTGATGGCAACTTCAAC | CTTTCAAGACTAATAGATTGCTCCTTACGA |
| | TGG(SEQ ID NO: 481) | GGAGACCTGATGGCAACTTCAACTGG |
| | | (SEQ ID NO: 1271) |
| Bax_4 | TACTTTGCTAGCAAACT | CTTTCAAGACTAATAGATTGCTCCTTACGA |
| | GGT (SEQ ID NO: 482) | GGAGACTACTTTGCTAGCAAACTGGT (SEQ |
| | | ID NO: 1272) |
| Bax_5 | AGCACCAGTTTGCTAGC | CTTTCAAGACTAATAGATTGCTCCTTACGA |
| | AAA (SEQ ID NO: 483) | GGAGACAGCACCAGTTTGCTAGCAAA |
| | | (SEQ ID NO: 1273) |
| Bax_6 | AACTGGGGCCGGGTTG | CTTTCAAGACTAATAGATTGCTCCTTACGA |
| | TTGC (SEQ ID NO: 484) | GGAGACAACTGGGGCCGGGTTGTTGC |
| | | (SEQ ID NO: 1274) |
| Fut8_1 | CCACTTTGTCAGTGCGT | CTTTCAAGACTAATAGATTGCTCCTTACGA |
| | CTG (SEQ ID NO: 507) | GGAGACCCACTTTGTCAGTGCGTCTG (SEQ |
| | | ID NO: 1325) |
| Fut8_2 | CTCAATGGGATGGAAG | CTTTCAAGACTAATAGATTGCTCCTTACGA |
| | GCTG (SEQ ID NO: 508) | GGAGACCTCAATGGGATGGAAGGCTG |
| | | (SEQ ID NO: 1326) |
| Fut8_3 | AGGAATACATGGTACA | CTTTCAAGACTAATAGATTGCTCCTTACGA |
| | CGTT (SEQ ID NO: 509) | GGAGACAGGAATACATGGTACACGTT |
| | | (SEQ ID NO: 1327) |
| Fut8_4 | AAGAACATTTTCAGCTT | CTTTCAAGACTAATAGATTGCTCCTTACGA |
| | CTC (SEQ ID NO: 510) | GGAGACAAGAACATTTTCAGCTTCTC (SEQ |
| | | ID NO: 1328) |
| Fut8_5 | ATCCACTTTCATTCTGC | CTTTCAAGACTAATAGATTGCTCCTTACGA |
| | GTT (SEQ ID NO: 511) | GGAGACATCCACTTTCATTCTGCGTT (SEQ |
| | | ID NO: 1329) |
| Fut8_6 | TTTGTTAAAGGAGGCA | CTTTCAAGACTAATAGATTGCTCCTTACGA |
| | AAGA(SEQ ID NO: 512) | GGAGACTTTGTTAAAGGAGGCAAAGA |
| | | (SEQ ID NO: 1330) |

[0503] The inventors went on to demonstrate the ability of CasΦ.12 to mediate gene editing via the homology directed repair pathway. The inventors tested DNA donor oligos with 25 bp, 50 bp or 90 bp homology arms (HA), as shown in FIG. 16B. The donor oligos were delivered to CHO cells with or without CasΦ.12 and crRNA. As seen in FIG. 16C, indels were not detected in the absence of CasΦ.12. Whereas, indels were detected in the presence of CasΦ.12 and confirmed by sequencing the endogenous targeted locus (FIG. 16D). The sequencing analysis also showed the successful incorporation of a DNA donor oligo into the endogenous targeted locus (FIG. 16E).

[0504] The inventors further demonstrated the ability of CasΦ.12 to mediate gene editing of Bax and Fut8 genes via the homology directed repair pathway. In this additional study, DNA donor oligos with 20 bp, 25 bp, 30 bp or 40 bp 90 bp HA were used, shown in FIG. 16I. These DNA donor oligos were either unmodified or modified with phosphorothioate (PS) bonds between the first 5′, and the last two 3′ bases. As shown in FIG. 16J, CasΦ.12 mediated successful incorporation of a DNA donor oligo into the endogenous targeted locus. Finally, the inventors further optimized CasΦ.12-mediated genome editing of Fut8 using AAV6 delivery of the DNA donor. In this study, CHO cells were transfected with Fut8-targeting RNP (500 pmol) using Lonza nucleofection protocols. AAV6 donors at different MOIs were added to cells immediately after transfection. The frequency of indels and HDR was analyzed by NGS. As shown in FIG. 16K and FIG. 16L, CasΦ.12 induced the generation of indels and HDR.

[0505] These data further demonstrate the utility of CasΦ polypeptides as a genome editing tool.

### Example 22

[0506] CasΦ-Mediated Genome Editing in K562 Cells

[0507] This example illustrates the ability of CasΦ polypeptides to mediate genome editing in K562 cells, a myelogenous leukemia cell line which is particularly useful for biological and medical research by virtue of its amenability for nucleofection by electroporation. In this study, K562 cells were nucleofected with Cas9 or CasΦ.12. To nucleofect the cells, 150,000 cells in SF solution (SF Cell Line 96 Amaxa) were added to the amount of plasmid (expressing the gRNA targeting the Fut8 gene and either Cas9 or CasΦ.12) indicated in FIG. 17. Amaxa program 96-FF-120 was used to nucleofect the cells. The cells were harvested two days after nucleofection and the frequency of indel mutations was determined. As shown in FIG. 17, as the amount of CasΦ.12 plasmid increased, the amount of indels detected in the endogenous Fut8 gene also increased.

### Example 23

[0508] CasΦ-Mediated Genome Editing in Primary Cells

[0509] This example illustrates the ability of CasΦ polypeptides to mediate genome editing in primary cells, such as T cells. In this study, CasΦ.12 was delivered to human T cells. CasΦ.12 was complexed to its native crRNA comprising the spacer sequence 5′-GGGCCGAGAUGUCUCGCUCC-3′ (SEQ ID NO: 1429). Complexes were formed in a 3:1 ratio of crRNA:protein. For nucleofection, 50 pmol RNP was mixed with 320,000 cells per well and the Amaxa EH115 program was used. Immediately after nucleofection, 80 μl pre-warmed culture medium was added to each well. The cells were then left in the cuvette plate for 15 minutes before transfer to the culture plate. Genomic DNA was extracted from cells on day 3 and day 5. Flow cytometry analysis was performed on day 5. As shown in FIG. 18A, when CasΦ.12 was delivered with a gRNA targeting the endogenous beta-2 microglobulin (B2M) gene, a distinct population of B2M-negative cells was detected by flow cytometry analysis demonstrating the CasΦ.12-mediated knockout of the endogenous B2M gene. In the absence of the B2M-targeting gRNA, the population of B2M-negative cells was not observed by flow cytometry. Indels were confirmed by next generation sequencing analysis, as shown FIG. 18C, and quantified, as shown in FIG. 18B.

[0510] The inventors went on to use CasΦ.12 to target the T-cell receptor alpha-constant (TRAC) gene. Knockout of the TRAC gene prevents expression of the T cell receptor. Accordingly, TRAC knockout T cells are beneficial for T cell therapies (e.g. CAR-T cell therapies) because TRAC knockout T cells have a longer half-life in vivo as the T cells have less potential to attack the recipient's normal cells. In this study, CasΦ.12 and gRNA targeting the TRAC gene (CasPhi1 or CasPhi7) were delivered to T cells. As shown in FIG. 18D, the delivery of the CasΦ.12 and the gRNA resulted in a population of TRAC-negative cells, which were detected by flow cytometry. The inventors went on to confirm the presence of indel mutations by sequencing the target locus. As shown in FIG. 18E, the sequence analysis revealed insertion, deletion and substitution mutations at the endogenous targeted locus. The frequency of indel mutations was quantified, as shown in FIG. 18F.

[0511] These data demonstrate the utility of CasΦ polypeptides as a robust genome editing tool in primary human cells.

### Example 24

[0512] Separable DNA Strand Cleavage Reactions of CasΦ Nucleases

[0513] This example further illustrates the mechanism of DNA strand cleavage by CasΦ polypeptides. In this study, CasΦ.4, CasΦ.12 and CasΦ.18 were complexed with their native crRNA. RNP complexes were formed by a 20 minute incubation at room temperature. The target plasmid was a 2.1 kb plasmid containing the target sequence

(SEQ ID NO: 108)
TATTAAATACTCGTATTGCTGTTCGATTAT.

carried out at 37° C. and had a duration of 30 minutes. The cleavage products were then analyzed by gel electrophoresis. As shown in FIG. 19, CasΦ polypeptides nick supercoiled (sc) DNA by cleaving the non-target DNA strand. Some CasΦ polypeptides, such as CasΦ.4 and CasΦ.12, then go on to cleave the second (target) strand to generate a linear product from a plasmid target. Whereas some CasΦ polypeptides, such as CasΦ.18, function as nickases and do not go on to cleave the second strand. CasΦ cleavage activity is dependent on metal cations, such as Mg²⁺. Varying the concentration of Mg²⁺ allows the cleavage of the first strand and then second strand by CasΦ.4 and CasΦ.12 to be visualized. As the concentration of Mg²⁺ increases, the amount of linearized product detected increases indicating that the second strand has been cleaved in the CasΦ.4 and CasΦ.12 reactions.

### Example 25

[0514] Detection of a Target Nucleic Acid by CasΦ Polypeptides

[0515] This example illustrates the use of CasΦ.4 and CasΦ.18 in a nucleic acid detection assay by virtue of trans cleavage activity of ssDNA. In this study, 100 nM RNP was prepared and used in a detection assay. In the detection assay, the target dsDNA was at a concentration of 10 nM and the ssDNA reporter molecule was at a concentration of 100 nM. The target dsDNA included 5 target sequences, which were targeted by a pool of 5 gRNAs) with 7 base pairs flanking the 20 nucleotide target sequences on both 5′ and 3′ sides, as shown in FIG. 20. The detection assay was carried out at 37° C. The buffer conditions provided in TABLE 9 were tested in the detection assay. All buffers were supplemented with 0.1 mg/ml BSA and 1 mM TCEP. As seen in FIG. 20, when a gRNA (complexed to a CasΦ polypeptide) hybridizes to a target nucleic acid, the CasΦ's trans cleavage activity is activated such that a labeled ssDNA reporter is degraded. The degradation of the ssDNA reporter is detected as fluorescence thus allowing CasΦ polypeptides to be used in assays to achieve fast and high-fidelity detection of target nucleic acid molecules in a sample. As shown in FIG. 20, high pH (e.g. 8-9) and high Mg²⁺ concentration (e.g. 12-15 mM) provided preferred conditions for the detection assay.

TABLE 9

| buffer ID # | pH | 1X NaCl (mM) | 1X MgCl₂ (mM) |
|---|---|---|---|
| 1 | 9 | 150 | 15 |
| 2 | 9 | 150 | 3 |
| 3 | 7.5 | 0 | 3 |
| 4 | 9 | 0 | 3 |
| 5 | 9 | 0 | 15 |
| 6 | 7.5 | 150 | 3 |
| 7 | 7.5 | 150 | 15 |
| 8 | 8 | 37.5 | 3 |
| 9 | 8.5 | 150 | 12 |
| 10 | 7.5 | 0 | 15 |
| 11 | 8.5 | 0 | 6 |
| 12 | 9 | 150 | 3 |
| 13 | 9 | 0 | 3 |
| 14 | 9 | 150 | 15 |
| 15 | 8 | 150 | 6 |
| 16 | 7.5 | 150 | 15 |
| 17 | 8 | 112.5 | 15 |
| 18 | 9 | 0 | 15 |
| 19 | 7.5 | 150 | 3 |
| 20 | 8.5 | 112.5 | 3 |
| 21 | 8.5 | 37.5 | 12 |
| 22 | 7.5 | 0 | 3 |
| 23 | 8.5 | 112.5 | 6 |
| 24 | 7.5 | 37.5 | 6 |
| 25 | 8 | 0 | 12 |
| 26 | 7.5 | 112.5 | 6 |
| 27 | 8.5 | 37.5 | 15 |
| 28 | 9 | 37.5 | 6 |
| 29 | 9 | 112.5 | 12 |
| 30 | 7.5 | 37.5 | 12 |
| 31 | 7.5 | 0 | 15 |
| 32 | 7.5 | 112.5 | 12 |

[0516] These data demonstrate the utility of CasΦ polypeptides in nucleic acid detection assays.

### Example 26

[0517] High Efficiency of CasΦ Polypeptide-Mediated Genome Editing in Primary Cells

[0518] The present example shows that CasΦ.12 mediates high genome editing efficiency that is comparable the editing efficiency mediated by Cas9. Results of the study are shown in FIG. 21. In this study, CasΦ.12 mRNA (SEQ ID NO: 107) with a

gRNA
(CUUUCAAGACUAAUAGAUUGCUCCUUACGAGGAGACGGGCCGAGAUGU
CUCGCUCC (SEQ ID NO: 1430)); spacer sequence is
bold and underlined)

[0519] or Cas9 mRNA with a gRNA (GGCCGAGATGTCTCGCTCCG (SEQ ID NO: 1431)) was delivered to T cells. gRNAs used in this study targeted the B2M gene. For nucleofection, T cells were resuspended in BTXpress electroporation medium (5×10⁵ cells per well) and mixed with CasΦ.12 or Cas9 mRNA and 500 pmol gRNA. Cells were collected on day 2 for extraction of genomic DNA, and the frequency of indel mutations was determined. As shown in FIG. 21A, when 20 μg of CasΦ.12 mRNA was delivered with gRNA to T cells, high genome editing efficiency was achieved, and this was at a similar level to of genome editing achieved using Cas9. Cells were also collected on Day 2 for flow cytometry to determine the frequency of B2M knockout. As shown in FIG. 21B and quantified in FIG. 21A, a similar percentage of B2M-negative cells were detected after delivery of CasΦ.12 or Cas9 mRNA. Accordingly, this example demonstrates high efficiency of CasΦ polypeptide-mediated genome efficiency in primary cells.

### Example 27

[0520] CasΦ Polypeptide-Mediated Genome Editing in CHO Cells

[0521] This present example describes the identification of optimized gRNAs for CasΦ.12-mediated genome editing in CHO cells. In this study, CasΦ.12 polypeptides (SEQ ID NO: 107) were complexed with a gRNA shown in TABLE 10. CHO cells were resuspended in SF solution and Lonza setting FF-137 was used to nucleofect the cells (200,000 cells per well) with 250 pmol RNP. Genomic DNA was extracted and the presence of indels was confirmed by next generation sequence analysis. FIG. 22A shows the frequency of indel mutations induced by CasΦ.12 polypeptides complexed with a 2′fluoro modified gRNA. As shown in FIG. 22B, gRNAs with ˜20% or greater editing efficiency were identified.

TABLE 10

| | Spacer sequence | RNA sequence (5′→3′), |
|---|---|---|
| Name | (5′→3′) | shown as DNA |
| R2849_Bakl_nsd_ | CTGACTCCCAGCTCTGA | CTTTCAAGACTAATAGATTGCTCC |
| sg1 | CCC (SEQ ID NO: 449) | TTACGAGGAGACCTGACTCCCAG |
| | | CTCTGACCC (SEQ ID NO: 1203) |
| R2855_Bak1_nsd_ | CCATCTCCACCATCAGG | CTTTCAAGACTAATAGATTGCTCC |
| sg7 | AAC (SEQ ID NO: 455) | TTACGAGGAGACCCATCTCCACC |
| | | ATCAGGAAC (SEQ ID NO: 1209) |
| R3977 | TCCAGACGCCATCTTTCA | CTTTCAAGACTAATAGATTGCTCC |
| Bak1_exon1_sg1 | GG | TTACGAGGAGACTCCAGACGCCA |
| | (SEQ ID NO: 465) | TCTTTCAGG (SEQ ID NO: 1219) |
| R3978 | TGGTAAGAGTCCTCCTG | CTTTCAAGACTAATAGATTGCTCC |
| Bakl_exon1_sg2 | CCC | TTACGAGGAGACTGGTAAGAGTC |
| | (SEQ ID NO: 466) | CTCCTGCCC (SEQ ID NO: 1220) |
| R3979 | TTACAGCATCTTGGGTC | CTTTCAAGACTAATAGATTGCTCC |
| Bak1_exon3_sg1 | AGG | TTACGAGGAGACTTACAGCATCT |
| | (SEQ ID NO: 467) | TGGGTCAGG (SEQ ID NO: 1221) |
| R3980 | GGTCAGGTGGGCCGGCA | CTTTCAAGACTAATAGATTGCTCC |
| Bak1_exon3_sg2 | GCT | TTACGAGGAGACGGTCAGGTGGG |
| | (SEQ ID NO: 468) | CCGGCAGCT (SEQ ID NO: 1222) |
| R3981 | CTATCATTGGAGATGAC | CTTTCAAGACTAATAGATTGCTCC |
| Bak1_exon3_sg3 | ATT | TTACGAGGAGACCTATCATTGGA |
| | (SEQ ID NO: 469) | GATGACATT (SEQ ID NO: 1223) |
| R3982 | GAGATGACATTAACCGG | CTTTCAAGACTAATAGATTGCTCC |
| Bak1_exon3_sg4 | AGA | TTACGAGGAGACGAGATGACATT |
| | (SEQ ID NO: 470) | AACCGGAGA (SEQ ID NO: 1224) |
| R3983 | TGGAACTCTGTGTCGTAT | CTTTCAAGACTAATAGATTGCTCC |
| Bak1_exon3_sg5 | CT | TTACGAGGAGACTGGAACTCTGT |
| | (SEQ ID NO: 471) | GTCGTATCT (SEQ ID NO: 1225) |
| R3984 | CAGAATTTACTGGAGCA | CTTTCAAGACTAATAGATTGCTCC |
| Bak1_exon3_sg6 | GCT | TTACGAGGAGACCAGAATTTACT |
| | (SEQ ID NO: 472) | GGAGCAGCT (SEQ ID NO: 1226) |
| R3985 | ACTGGAGCAGCTGCAGC | CTTTCAAGACTAATAGATTGCTCC |
| Bak1_exon3_sg7 | CCA | TTACGAGGAGACACTGGAGCAGC |
| | (SEQ ID NO: 473) | TGCAGCCCA (SEQ ID NO: 1227) |
| R3986 | CCAGCTGTGGGCTGCAG | CTTTCAAGACTAATAGATTGCTCC |
| Bak1_exon3_sg8 | CTG | TTACGAGGAGACCCAGCTGTGGG |
| | (SEQ ID NO: 474) | CTGCAGCTG (SEQ ID NO: 1228) |
| R3987 | GTAGGCATTCCCAGCTG | CTTTCAAGACTAATAGATTGCTCC |
| Bak1_exon3_sg9 | TGG | TTACGAGGAGACGTAGGCATTCC |
| | (SEQ ID NO: 475) | CAGCTGTGG (SEQ ID NO: 1229) |
| R3988 | GTGAAGAGTTCGTAGGC | CTTTCAAGACTAATAGATTGCTCC |
| Bak1_exon3_sg10 | ATT | TTACGAGGAGACGTGAAGAGTTC |
| | (SEQ ID NO: 476) | GTAGGCATT (SEQ ID NO: 1230) |
| R3989 | ACCAAGATTGCCTCCAG | CTTTCAAGACTAATAGATTGCTCC |
| Bak1_exon3_sg11 | GTA | TTACGAGGAGACACCAAGATTGC |
| | (SEQ ID NO: 477) | CTCCAGGTA (SEQ ID NO: 1231) |
| R3990 | CCTCCAGGTACCCACCA | CTTTCAAGACTAATAGATTGCTCC |
| Bak1_exon3_sg12 | CCA | TTACGAGGAGACCCTCCAGGTAC |
| | (SEQ ID NO: 478) | CCACCACCA (SEQ ID NO: 1232) |

### Example 28

[0522] Minimal Off-Target Effects of CasΦ Polypeptides

[0523] This example illustrates the off-target profiles of CasΦ.12 and Cas9. A major challenge in the translation of CRISPR/Cas9 technology into the clinic has been overcoming off-target effects. Off-target effects arise where a gRNA tolerates mismatches in complementarity of the gRNA and target sequence, and so the gRNA hybridizes to a sequence that is not the target sequence. Off-target effects are a source of major concern as it is important to avoid the production in unnecessary mutations that could be detrimental. In this study, CIRCLE-seq was performed to detect off-target sites (Tsai et al. 2017 Nature Methods). Sequencing was performed on genomic DNA extracted from CHO cells that had been transfected with CasΦ.12 polypeptide (SEQ ID NO: 107) and a gRNA targeting Fut8, CasΦ.12 polypeptide and a gRNA targeting BAX or Cas9 polypeptide and a gRNA targeting BAX. As shown in FIG. 23A, CasΦ.12 targeting Fut8 induced minimal off-target mutations. FIG. 23D shows the off-target mutations induced by Cas9 editing of Fut8. Similarly, CasΦ. 12 targeting BAX induced minimal off-target mutations, as shown in FIG. 23B. Cas9 targeting BAX induced a higher percentage of off-targets mutations, as shown in FIG. 23C, compared to CasΦ.12. Cas9 targeting Bak1 also induced a higher percentage of off-targets mutations, as shown in FIG. 23E, compared to CasΦ.12, as shown in FIG. 23F.

[0524] In a further study, GUIDE-Seq was performed to detect off-target sites (Tsai et al. 2015 Nature Biotechnology). Sequencing was performed on genomic DNA extracted from HEK293 cells following delivery of either CasΦ.12 polypeptide or Cas9 polypeptide and a gRNA targeting human Fut8. As shown in FIG. 23G, no off target mutations were detected in the CasΦ.12 polypeptide sample. Whereas, several off-target mutations were detected in Cas9 polypeptide sample, as shown in FIG. 23H. Accordingly, this example demonstrates that CasΦ polypeptides have fewer off-target effects than Cas9.

### Example 29

[0525] CasΦ Polypeptide-Mediated Genome Editing Via Homology Directed Repair (HDR)

[0526] The present example illustrates the ability of that CasΦ.12 to mediate HDR. In this study, CasΦ.12 polypeptide (SEQ ID NO: 107) was complexed with a gRNA (CUUUCAAGACUAAUAGAUUGCUCCUUACGAGGAGACGAGUCUCUCAGCUGGUAC AC (SEQ ID NO: 1432)) targeting the TRAC gene and delivered to T cells. RNP complexes were formed by a 10 minute incubation at room temperature. T cells were resuspended at 5×10⁵ cells/20 μL in electroporation solution (Lonza). T cells were nucleofected using the Amaxa P3 kit and Amaxa 4D Nucleofector with pulse code EH115. Immediately after nucleofection, 80 μl pre-warmed culture medium was added to each well. The cells were then left in the cuvette plate for 10 minutes before transfer to the culture plate. Cells were harvested and genomic DNA was extracted. The frequency of indel mutations HDR was determined and shown in FIG. 24A. The frequency of indel mutations and HDR was combined to determine the frequency of modification. Flow cytometry was also performed to determine the frequency of TRAC knockout, as assessed by the loss of CD3 at the cell surface. FIG. 24A shows CasΦ.12-mediated gene editing via the HDR pathway. FIG. 24B shows a schematic of the donor oligonucleotide. Thus, this example demonstrates the use of CasΦ polypeptides as robust genome editing tools.

### Example 30

[0527] Multiplex Genome Editing with CasΦ Polypeptides

[0528] This example illustrates the ability of CasΦ RNP complexes to target multiple genes simultaneously. In this study, gRNAs targeting B2M or TRAC were incubated with CasΦ.12 polypeptides (SEQ ID NO: 107) for 10 minutes at room temperature to form RNP complexes. RNP complexes were formed with a variety of gRNAs with different modifications (unmodified, 2′-O-methyl on the last 3′ nucleotide of the crRNA (1me), 2′-O-methyl on the last two 3′ nucleotides of the crRNA (2me) and 2′-O-methyl on the last three 3′ nucleotides of the crRNA(3me)) and with different repeat and spacer sequences (20-20, which corresponds to 20 nucleotide repeat and 20 nucleotide spacer, and 20-17, which corresponds to 20 nucleotide repeat and 17 nucleotide spacer), as shown in TABLE 11. B2M targeting RNPs, TRAC targeting RNPs or B2M targeting RNPs and TRAC targeting RNPs were added to T cells. T cells were resuspended at 5×10⁵ cells/20 μL in Nucleofection P3 solution and an Amaxa 4D 96-well electroporation system with pulse code EH115 was used to nucleofect the cells. Immediately after nucleofection, 85 μl pre-warmed culture medium was added to each well. The cells were then left in the cuvette plate for 10 minutes before transfer to the culture plate. On Day 3, genomic DNA was extracted. On Day 5, cells were harvested for flow cytometry. Quantification of the percentage of B2M-negative and CD3-negative cells is shown in FIG. 25A for gRNAs with a repeat length of 20 nucleotides and a spacer length of 20 nucleotides, and in FIG. 25B for gRNAs with a repeat length of 20 nucleotides and a spacer length of 17 nucleotides. Corresponding flow cytometry panels can be seen in FIG. 25C for gRNAs of different repeat and spacer lengths and with different modifications.

[0529] In a further study, RNP complexes were formed using CasΦ.12 and modified gRNAs (unmodified, 1me, 2me, 3me, 2′-fluoro on the last 3′ nucleotide of the crRNA (1F), 2′-fluoro on the last two 3′ nucleotides of the crRNA (2F) and 2′-fluoro on the last three 3′ nucleotides of the crRNA (3F)) with different lengths of spacer sequences (20-20 and 20-17 as above) that target TRAC. T cells were nucleofected with RNP complexes (125 μmol) using the P3 primary cell nucleofection kit and an Amaxa 4D 96-well electroporation system with pulse code EH115. As shown in FIG. 25D, —90% editing efficiency was achieved using CasΦ.12 and modified gRNAs. FIG. 25E shows a flow cytometry plot illustrating ˜90% TRAC knockout in T cells after delivery of CasΦ.12 and modified gRNAs. This data further demonstrates the ability of CasΦ to mediate high efficiency genome editing.

TABLE 11

| | | | Repeat | Spacer | |
|---|---|---|---|---|---|
| | | | sequence | sequence | crRNA sequence |
| Name | Target | Modification | (5′→3′) | (5′→3′) | (5′→3′) |
| R3150 | B2M | Unmodified, | AUUGCUC | CAGUGGGGG | AUUGCUCCUUAC |
| 20-20 | Exon 2 | 2′OMe at last | CUUACGA | UGAAUUCAG | GAGGAGACCAG |
| | | 3′ base (1me) | GGAGAC | UG (SEQ ID | UGGGGGUGAAU |
| | | 2′OMe at last | (SEQ ID NO: | NO: 1434) | UCAGUG (SEQ ID |
| | | two 3′ bases | 1433) | | NO: 1435) |
| | | (2me) | | | |
| | | 2′OMe at last | | | |
| | | three 3′ bases | | | |
| | | (3me) | | | |
| R3042 | TRAC | Unmodified, | AUUGCUC | GAGUCUCUC | AUUGCUCCUUAC |
| 20-20 | Exon 1 | 1me | CUUACGA | AGCUGGUAC | GAGGAGACGAG |
| | | 2me | GGAGAC | AC (SEQ ID | UCUCUCAGCUGG |
| | | 3me | (SEQ ID NO: | NO: 1436) | UACAC (SEQ ID |
| | | | 1433) | | NO: 1437) |
| R3150 | B2M | Unmodified, | AUUGCUC | CAGUGGGGG | AUUGCUCCUUAC |
| 20-17 | Exon 2 | 1me | CUUACGA | UGAAUUCA | GAGGAGACCAG |
| | | 2me | GGAGAC | (SEQ ID NO: | UGGGGGUGAAU |
| | | 3me | (SEQ ID NO: | 1438) | UCA (SEQ ID NO: |
| | | | 1433) | | 1439) |
| R3042 | TRAC | Unmodified, | AUUGCUC | CAGUGGGGG | AUUGCUCCUUAC |
| 20-17 | Exon 1 | 1me | CUUACGA | UGAAUUCA | GAGGAGACGAG |
| | | 2me | GGAGAC | (SEQ ID NO: | UCUCUCAGCUGG |
| | | 3me | (SEQ ID NO: | 1440) | UA (SEQ ID NO: |
| | | | 1433) | | 1441) |

### Example 31

[0530] Cas0 Polypeptides have an Extended Seed Region

[0531] The present example shows that CasΦ.12 has an extended seed region compared to Cas9 and does not tolerate mismatches in the complementarity of the spacer and target sequences within the first 1-16 nucleotides from the 5′ of the spacer sequence. In this study, CasΦ.12 (SEQ ID NO: 107) was complexed with a gRNA targeting TRAC gene and delivered to T cells. Spacer sequences contained a single mismatch at the position indicated in FIG. 26A or a mismatch at each of the two positions indicated in FIG. 26B. Mismatches were generated by substituting a purine for a purine (i.e. A to G and vice versa) and a pyrimidine for a pyrimidine (i.e. U to C and vice versa). RNP complexes were formed by a 10 minute incubation at room temperature. T cells were resuspended at 5×10⁵ cells/20 μL in electroporation solution (Lonza). Amaxa P3 kit and Amaxa 4D Nucleofector was used to nucleofect the T cells. Immediately after nucleofection, 80 μl pre-warmed culture medium was added to each well. The cells were then left in the cuvette plate for 10 minutes before transfer to the culture plate. Cells were harvested for extraction of genomic DNA to determine the frequency of indel mutations and for flow cytometry to determine the percentage of CD3 knockout cells. As shown in FIG. 26A, no indel mutations or CD3 knockout were detected when there was a single mismatch in the complementarity of the spacer and target sequences at positions 1-16 from the 5′ end of the spacer sequence. Similarly, no indels or CD3 knockout cells were detected when there was a double mismatch in the complementarity of the spacer and target sequences at positions 1-16 from the 5′ end of the spacer sequence as shown in FIG. 26B. The data shown in FIG. 26A and FIG. 26B demonstrate that CasΦ polypeptides do not tolerate mismatches in complementarity between the spacer sequence and target sequence in the 5′ 16 positions of the spacer. This region in which mismatches are not tolerated is known as the “seed region”. Thus the seed region of CasΦ.12 is the first 16 bases from the 5′ end of the spacer. In contrast, the seed region of Cas9 is much shorter and is reported to be only 5 nucleotides long (Wu et al., Quant Biol. 2014 June; 2(2): 59-70). Shorter seed regions result in increased likelihood of off-target effects because the likelihood of mismatches between the spacer and target occurring outside the seed region is increased. Accordingly, longer seed regions result in a reduced likelihood of off-target effects. The long seed region of CasΦ.12 is therefore advantageous over the short seed region of Cas9 and contributes to the reduced off-target effects of CasΦ.12. FIG. 26C and FIG. 26D provide schematics of the gRNAs with mismatches.

### Example 32

[0532] Use of Modified Guide RNAs with CasΦ Polypeptides

[0533] This example illustrates the ability of CasΦ.12 to mediate genome editing in CHO cells with modified gRNAs. In this study, RNP complexes were formed using CasΦ.12 polypeptide (SEQ ID NO: 107) and a modified gRNA shown in TABLE 12. For nucleofection, 200 pmol RNP was mixed with 200,000 cells per well. CHO cells were resuspended in SF solution and Lonza setting FF-137 was used to nucleofect the cells. Genomic DNA was extracted 48 hours after transfection and the frequency of indel mutations was determined. As shown in FIG. 27A, several modified gRNAs with editing efficiency of ˜10% were identified. In a further study, additional modified gRNAs were tested. As shown in FIG. 27B, modified gRNAs with editing efficiency of up to 40-50% were identified.

[0534] gRNAs with phosphorothioate (PS) backbone modifications, 2′-fluoro (2′-F) and 2′-O-Methyl (2′OMe) sugar modifications are known to increase metabolic stability and binding affinity to RNA, and replacing RNA nucleotides with DNA generates gRNAs with highly efficient gene-editing activity compared to the natural crRNA (Randar et al, 2015, PNA; McMahon et al. 2017, Molecular Therapy Vol. 26 No 5).

TABLE 12

| SEQ | Name | | | | Name |
|---|---|---|---|---|---|
| ID | (FIG. | | | Full modified guide | (FIG.2 |
| NO. | 27A) | Modification | Position | (repeat and spacer) | 7A, B) |
| 1442 | R2466_ | 2′-O-Methyl | 2′OMe at 3 first | mC*mU*mU*UCAAGACUA | Synthego_ |
| | Mo1 | (2′OMe), 3′ | (5′) and last (3′) | AUAGAUUGCUCCUUACG | Mod |
| | | phosphoro- | bases, 3′ PS | AGGAGACAGGAAUACAU | |
| | | thioate (PS) | bonds between | GGUACACmG*mU*mU* | |
| | | bonds | first 3 (5′) and | | |
| | | | last 2 (3′) bases | | |
| 1443 | R2466_ | 2′OMe, 3′, | 2′OMe at 3 first | mA*mA*mU*AGAUUGCUC | |
| | Mo2 | 25 nucleotide | (5′) and last (3′) | CUUACGAGGAGACAGGA | |
| | | repeat | bases, 3′ PS | AUACAUGGUACACmG*m | |
| | | | bonds between | U*mU | |
| | | | first 3 (5′) and | | |
| | | | last 2 (3′) bases | | |
| 1444 | R2466_ | 2′-O- | 2′-O-Methoxy- | /52MOErA*/i2MOErA/UA | |
| | Mo3 | methoxy- | ethyl bases at 2 | GAUUGCUCCUUACGAGG | |
| | | ethyl bases | first (5′) and last | AGACAGGAAUACAUGGU | |
| | | | (3′) bases, 3′ PS | ACACG/i2MOErT/32MOErT | |
| | | | bonds between | | |
| | | | first 2 (5′) and | | |
| | | | last 2 (3′) bases | | |
| 1445 | R2466_ | 2′-Fluoro | First (5′) and last | /52FC/UUUCAAGACUAAU | |
| | Mo4 | (2′-F) | (3′) base | AGAUUGCUCCUUACGAG | |
| | | | | GAGACAGGAAUACAUGG | |
| | | | | UACACGU/32FU/ | |
| 1446 | R2466_ | 2′-F, 25 | First (5′) and last | /52FA/AUAGAUUGCUCCU | 1F, 45F |
| | Mo5 | nucleotide | (3′) base | UACGAGGAGACAGGAAU | (25 nt |
| | | repeat | | ACAUGGUACACGU/32FU/ | R) |
| 1447 | R2466_ | 2′-F, PS, | First (5′) base | mC*U*UUCAAGACUAAUA | 1, 2 |
| | Mo6 | 2′OMe | 2′OMe, PS | GAUUGCUCCUUACGAGG | OMe- |
| | | | between first | AGACAGGAAUACAUGGU | PS, 54, |
| | | | two (5′) bases, last | ACA/i2FC/i2FG/i2FU/ | 55, 56′F |
| | | | 4 (3′) bases 2′-F | 32FU/ | |
| 1448 | R2466_ | 2′-F, PS, | First (5′) base | mA*A*UAGAUUGCUCCUU | 1, 2 |
| | Mo7 | 2′OMe, 25 | 2′OMe, PS | ACGAGGAGACAGGAAUA | OMe- |
| | | nucleotide | between first | CAUGGUACA/i2FC/i2FG/ | PS, 54, |
| | | repeat | two (5′) bases, last | i2FU/32FU | 55, 56′F |
| | | | 4 (3′)bases 2′-F | | (25nt |
| | | | | | R) |
| 1449 | R2466_ | 2′-F | Last 4 (3′) bases | CUUUCAAGACUAAUAGA | 54, 55, |
| | Mo8 | | 2′-F | UUGCUCCUUACGAGGAG | 56 2′F |
| | | | | ACAGGAAUACAUGGUAC | |
| | | | | A/i2FC/i2FG/i2FU/32FU | |
| 1450 | R2466_ | 2′-F, 25 | Last 4 (3′) bases | AAUAGAUUGCUCCUUAC | 54, 55, |
| | Mo9 | nucleotide | 2′-F | GAGGAGACAGGAAUACA | 56 2′F |
| | | repeat | | UGGUACA/i2FC/i2FG/i2FU/ | (25 nt |
| | | | | 32FU | R) |
| 1451 | R2466_ | C3 Spacer, | First (5′) and last | CUUUCAAGACUAAUAGA | |
| | Mo10 | 21 nucleotide | (3′) base | UUGCUCCUUACGAGGAG | |
| | | spacer | | ACAGGAAUACAUGGUAC | |
| | | | | ACGUUG | |
| 1452 | R2466_ | C3 Spacer, | First (5′) and last | AAUAGAUUGCUCCUUAC | |
| | Mo11 | 21 nucleotide | (3′) base | GAGGAGACAGGAAUACA | |
| | | spacer, 25 | | UGGUACACGUUG | |
| | | nucleotide | | | |
| | | spacer | | | |
| 1453 | R2466_ | DNA bases + | 2′OMe at 3 | mC*mU*mU*UCAAGACUA | 1, 2, 3 |
| | Mo12 | 2′OMe, PS | first (5′) bases, | AUAGAUUGCUCCUUACG | Ome- |
| | | | last 4 (3′) bases | AGGAGACAGGAAUACAU | PS 54, |
| | | | DNA | GGUACACGTT | 55, 56 |
| | | | | | DNA |
| 1454 | R2466_ | DNA | Last (3′) 4 | CUUUCAAGACUAAUAGA | |
| | Mo13 | nucleoside | nucleoside | UUGCUCCUUACGAGGAG | |
| | | | | ACAGGAAUACAUGGUAC | |
| | | | | ACGTT | |
| 1455 | R2466_ | DNA | Nucleoside 1 of | CUUUCAAGACUAAUAGA | 1, 54, |
| | Mo14 | nucleosides | spacer and last | UUGCUCCUUACGAGGAG | 55, 56 |
| | | | (3′) 4 nucleosides | ACAGGAAUACAUGGUAC | DNA |
| | | | | ACGTT | |
| 1456 | R2466_ | DNA | Nucleoside 8 of | CUUUCAAGACUAAUAGA | |
| | Mo15 | nucleosides | spacer and last | UUGCUCCUUACGAGGAG | |
| | | | (3′) 4 nucleosides | ACAGGAAUACAUGGUAC | |
| | | | | ACGTT | |
| 1457 | R2466_ | DNA | Nucleoside 9 of | CUUUCAAGACUAAUAGA | |
| | Mo16 | nucleosides | spacer and last | UUGCUCCUUACGAGGAG | |
| | | | (3′) 4 nucleosides | ACAGGAAUACAUGGUAC | |
| | | | | ACGTT | |
| 1458 | R2466_ | DNA | Nucleoside 1 and | CUUUCAAGACUAAUAGA | 1, 8, 54, |
| | Mo17 | nucleosides | 8 of spacer and | UUGCUCCUUACGAGGAG | 55, 56 |
| | | | last (3′) 4 | ACAGGAAUACAUGGUAC | DNA |
| | | | nucleosides | ACGTT | |
| 1459 | R2466_ | DNA | Nucleoside 1 and | CUUUCAAGACUAAUAGA | |
| | Mo18 | nucleosides | 9 of spacer and | UUGCUCCUUACGAGGAG | |
| | | | last (3′) 4 | ACAGGAAUACAUGGUAC | |
| | | | nucleosides | ACGTT | |
| 1460 | R2466_ | DNA | Nucleoside 1, 8 | CUUUCAAGACUAAUAGA | 1, 8, 9, |
| | Mo19 | nucleosides | and 9 of spacer | UUGCUCCUUACGAGGAG | 54, 55, |
| | | | and last (3′) 4 | ACAGGAAUACAUGGUAC | 56 |
| | | | nucleosides | ACGTT | DNA |
| 1461 | R2466_ | DNA bases, | Nucleoside 1, 8 | AAUAGAUUGCUCCUUAC | |
| | Mo20 | 25 nucleotide | and 9 of spacer | GAGGAGACAGGAAUACA | |
| | | repeat | and last (3′) 4 | UGGUACACGTT | |
| | | | nucleosides | | |
| 1462 | R2466_ | Poly-A-tail, | | AAUAGAUUGCUCCUUAC | |
| | Mo21 | 25 nucleotide | | GAGGAGACAGGAAUACA | |
| | | repeat | | UGGUACACGUUAAAAAA | |
| | | | | A | |
| 1463 | R2466_ | DNA bases, | 2′OMe and PS at | mC*mU*mU*UCAAGACUA | 1, 2, 3 |
| | Mo22 | 2′OMe, PS | first 3 (5′) bases, | AUAGAUUGCUCCUUACG | OMe, |
| | | | DNA bases at 1, 8 | AGGAGACAGGAAUACAU | 1, 8, 9, |
| | | | and 9 of spacer, | GGUACACGTT | 54, 55, |
| | | | PS at last 4 (3′) | | 56 |
| | | | bases | | DNA |
| 1464 | R2466_ | Unmodified, | | AAUAGAUUGCUCCUUAC | |
| | Mo23 | 25 nucleotide | | GAGGAGACAGGAAUACA | |
| | | repeat | | UGGUACACGUU | |
| 1465 | R2466 | Unmodified | Unmodified | CUUUCAAGACUAAUAGA | |
| | (Un- | | | UUGCUCCUUACGAGGAG | |
| | modified) | | | ACAGGAAUACAUGGUAC | |
| | | | | ACGUU | |

### Example 33

[0535] Optimization of Guide RNA Repeat and Spacer Length in CHO Cells

[0536] This example describes the optimization of repeat and spacer lengths of gRNAs for genome editing in CHO cells. In this study, RNP complexes were formed by incubating CasΦ.12 polypeptides (SEQ ID NO: 107) with a gRNA targeting Fut8 gene shown in TABLE 13. The gRNAs had different repeat lengths (20 to 36 nucleotides) or spacer lengths (15 to 30 nucleotides). Genomic DNA was extracted and the frequency of indel mutations was determined. For nucleofection, 250 pmol RNP was mixed with 200,000 cells per well. After 2 days, cells were collected and genomic DNA was extracted to determine the frequency of indel mutations. FIG. 28A shows the generation of indels by CasΦ.12 with gRNAs containing repeat sequences of different lengths. FIG. 28B the shows the generation of indels by CasΦ.12 with gRNAs containing spacer sequences of different lengths. The optimal gRNA for CasΦ.12-mediated genome editing in CHO cells was found to have a 20-nucleotide repeat length and a 17-nucleotide spacer length.

TABLE 13

| | | | Repeat | Spacer | |
|---|---|---|---|---|---|
| | Repeat | Spacer | sequence | sequence | crRNA sequence |
| Name | length | length | (5′→3′) | (5′→3′) | (5′→3′) |
| R3582 | 36 | 30 | CUUUCAAGA | AGGAAUACAU | CUUUCAAGACUAA |
| | | | CUAAUAGAU | GGUACACGUU | UAGAUUGCUCCUU |
| | | | UGCUCCUUA | GAAGAACAUU | ACGAGGAGACAGG |
| | | | CGAGGAGAC | (SEQ ID NO: | AAUACAUGGUACA |
| | | | (SEQ ID NO: | 1482) | CGUUGAAGAACAU |
| | | | 54) | | U (SEQ ID NO: 1499) |
| R3583 | 36 | 29 | CUUUCAAGA | AGGAAUACAU | CUUUCAAGACUAA |
| | | | CUAAUAGAU | GGUACACGUU | UAGAUUGCUCCUU |
| | | | UGCUCCUUA | GAAGAACAU | ACGAGGAGACAGG |
| | | | CGAGGAGAC | (SEQ ID NO: | AAUACAUGGUACA |
| | | | (SEQ ID NO: | 1483) | CGUUGAAGAACAU |
| | | | 54) | | (SEQ ID NO: 1500) |
| R3584 | 36 | 28 | CUUUCAAGA | AGGAAUACAU | CUUUCAAGACUAA |
| | | | CUAAUAGAU | GGUACACGUU | UAGAUUGCUCCUU |
| | | | UGCUCCUUA | GAAGAACA | ACGAGGAGACAGG |
| | | | CGAGGAGAC | (SEQ ID NO: | AAUACAUGGUACA |
| | | | (SEQ ID NO: | 1484) | CGUUGAAGAACA |
| | | | 54) | | (SEQ ID NO: 1501) |
| R3585 | 36 | 27 | CUUUCAAGA | AGGAAUACAU | CUUUCAAGACUAA |
| | | | CUAAUAGAU | GGUACACGUU | UAGAUUGCUCCUU |
| | | | UGCUCCUUA | GAAGAAC | ACGAGGAGACAGG |
| | | | CGAGGAGAC | (SEQ ID NO: | AAUACAUGGUACA |
| | | | (SEQ ID NO: | 1485) | CGUUGAAGAAC |
| | | | 54) | | (SEQ ID NO: 1502) |
| R3586 | 36 | 26 | CUUUCAAGA | AGGAAUACAU | CUUUCAAGACUAA |
| | | | CUAAUAGAU | GGUACACGUU | UAGAUUGCUCCUU |
| | | | UGCUCCUUA | GAAGAA (SEQ | ACGAGGAGACAGG |
| | | | CGAGGAGAC | ID NO: 1486) | AAUACAUGGUACA |
| | | | (SEQ ID NO: | | CGUUGAAGAA (SEQ |
| | | | 54) | | ID NO: 1503) |
| R3587 | 36 | 25 | CUUUCAAGA | AGGAAUACAU | CUUUCAAGACUAA |
| | | | CUAAUAGAU | GGUACACGUU | UAGAUUGCUCCUU |
| | | | UGCUCCUUA | GAAGA (SEQ | ACGAGGAGACAGG |
| | | | CGAGGAGAC | ID NO: 1487) | AAUACAUGGUACA |
| | | | (SEQ ID NO: | | CGUUGAAGA (SEQ |
| | | | 54) | | ID NO: 1504) |
| R3588 | 36 | 24 | CUUUCAAGA | AGGAAUACAU | CUUUCAAGACUAA |
| | | | CUAAUAGAU | GGUACACGUU | UAGAUUGCUCCUU |
| | | | UGCUCCUUA | GAAG (SEQ ID | ACGAGGAGACAGG |
| | | | CGAGGAGAC | NO: 1488) | AAUACAUGGUACA |
| | | | (SEQ ID NO: | | CGUUGAAG (SEQ ID |
| | | | 54) | | NO: 1505) |
| R3589 | 36 | 23 | CUUUCAAGA | AGGAAUACAU | CUUUCAAGACUAA |
| | | | CUAAUAGAU | GGUACACGUU | UAGAUUGCUCCUU |
| | | | UGCUCCUUA | GAA (SEQ ID | ACGAGGAGACAGG |
| | | | CGAGGAGAC | NO: 1489) | AAUACAUGGUACA |
| | | | (SEQ ID NO: | | CGUUGAA (SEQ ID |
| | | | 54) | | NO: 1506) |
| R3590 | 36 | 22 | CUUUCAAGA | AGGAAUACAU | CUUUCAAGACUAA |
| | | | CUAAUAGAU | GGUACACGUU | UAGAUUGCUCCUU |
| | | | UGCUCCUUA | GA (SEQ ID | ACGAGGAGACAGG |
| | | | CGAGGAGAC | NO: 1490) | AAUACAUGGUACA |
| | | | (SEQ ID NO: | | CGUUGA (SEQ ID |
| | | | 54) | | NO: 1507) |
| R3591 | 36 | 21 | CUUUCAAGA | AGGAAUACAU | CUUUCAAGACUAA |
| | | | CUAAUAGAU | GGUACACGUU | UAGAUUGCUCCUU |
| | | | UGCUCCUUA | G (SEQ ID NO: | ACGAGGAGACAGG |
| | | | CGAGGAGAC | 1491) | AAUACAUGGUACA |
| | | | (SEQ ID NO: | | CGUUG (SEQ ID |
| | | | 54) | | NO: 1508) |
| R3592 | 36 | 20 | CUUUCAAGA | AGGAAUACAU | CUUUCAAGACUAA |
| | | | CUAAUAGAU | GGUACACGUU | UAGAUUGCUCCUU |
| | | | UGCUCCUUA | (SEQ ID NO: | ACGAGGAGACAGG |
| | | | CGAGGAGAC | 1492) | AAUACAUGGUACA |
| | | | (SEQ ID NO: | | CGUU (SEQ ID |
| | | | 54) | | NO: 1509) |
| R3593 | 36 | 19 | CUUUCAAGA | AGGAAUACAU | CUUUCAAGACUAA |
| | | | CUAAUAGAU | GGUACACGU | UAGAUUGCUCCUU |
| | | | UGCUCCUUA | (SEQ ID NO: | ACGAGGAGACAGG |
| | | | CGAGGAGAC | 1493) | AAUACAUGGUACA |
| | | | (SEQ ID NO: | | CGU (SEQ ID |
| | | | 54) | | NO:1510) |
| R3594 | 36 | 18 | CUUUCAAGA | AGGAAUACAU | CUUUCAAGACUAA |
| | | | CUAAUAGAU | GGUACACG | UAGAUUGCUCCUU |
| | | | UGCUCCUUA | (SEQ ID NO: | ACGAGGAGACAGG |
| | | | CGAGGAGAC | 1494) | AAUACAUGGUACA |
| | | | (SEQ ID NO: | | CG (SEQ ID NO: 1511) |
| | | | 54) | | |
| R3595 | 36 | 17 | CUUUCAAGA | AGGAAUACAU | CUUUCAAGACUAA |
| | | | CUAAUAGAU | GGUACAC | UAGAUUGCUCCUU |
| | | | UGCUCCUUA | (SEQ ID NO: | ACGAGGAGACAGG |
| | | | CGAGGAGAC | 1495) | AAUACAUGGUACA |
| | | | (SEQ ID NO: | | C (SEQ ID NO: 1512) |
| | | | 54) | | |
| R3596 | 36 | 16 | CUUUCAAGA | AGGAAUACAU | CUUUCAAGACUAA |
| | | | CUAAUAGAU | GGUACA (SEQ | UAGAUUGCUCCUU |
| | | | UGCUCCUUA | ID NO: 1496) | ACGAGGAGACAGG |
| | | | CGAGGAGAC | | AAUACAUGGUACA |
| | | | (SEQ ID NO: | | (SEQ ID NO: 1513) |
| | | | 54) | | |
| R3597 | 36 | 15 | CUUUCAAGA | AGGAAUACAU | CUUUCAAGACUAA |
| | | | CUAAUAGAU | GGUAC (SEQ ID | UAGAUUGCUCCUU |
| | | | UGCUCCUUA | NO: 1497) | ACGAGGAGACAGG |
| | | | CGAGGAGAC | | AAUACAUGGUAC |
| | | | (SEQ ID NO: | | (SEQ ID NO: 1514) |
| | | | 54) | | |
| R3598 | 35 | 20 | UUUCAAGAC | AGGAAUACAU | UUUCAAGACUAAU |
| | | | UAAUAGAUU | GGUACACGUU | AGAUUGCUCCUUA |
| | | | GCUCCUUAC | (SEQ ID NO: | CGAGGAGACAGGA |
| | | | GAGGAGAC | 1498) | AUACAUGGUACAC |
| | | | (SEQ ID NO: | | GUU (SEQ ID |
| | | | 1466) | | NO: 1515) |
| R3599 | 34 | 20 | UUCAAGACU | AGGAAUACAU | UUCAAGACUAAUA |
| | | | AAUAGAUUG | GGUACACGUU | GAUUGCUCCUUAC |
| | | | CUCCUUACG | (SEQ ID NO: | GAGGAGACAGGAA |
| | | | AGGAGAC | 1498) | UACAUGGUACACG |
| | | | (SEQ ID NO: | | UU (SEQ ID NO: 1516) |
| | | | 1467) | | |
| R3600 | 33 | 20 | UCAAGACUA | AGGAAUACAU | UCAAGACUAAUAG |
| | | | AUAGAUUGC | GGUACACGUU | AUUGCUCCUUACG |
| | | | UCCUUACGA | (SEQ ID NO: | AGGAGACAGGAAU |
| | | | GGAGAC (SEQ | 1498) | ACAUGGUACACGU |
| | | | ID NO: 1468) | | U (SEQ ID NO: 1517) |
| R3601 | 32 | 20 | CAAGACUAA | AGGAAUACAU | CAAGACUAAUAGA |
| | | | UAGAUUGCU | GGUACACGUU | UUGCUCCUUACGA |
| | | | CCUUACGAG | (SEQ ID NO: | GGAGACAGGAAUA |
| | | | GAGAC (SEQ | 1498) | CAUGGUACACGUU |
| | | | ID NO: 1469) | | (SEQ ID NO: 1518) |
| R3602 | 31 | 20 | AAGACUAAU | AGGAAUACAU | AAGACUAAUAGAU |
| | | | AGAUUGCUC | GGUACACGUU | UGCUCCUUACGAG |
| | | | CUUACGAGG | (SEQ ID NO: | GAGACAGGAAUAC |
| | | | AGAC (SEQ ID | 1498) | AUGGUACACGUU |
| | | | NO: 1470) | | (SEQ ID NO: 1519) |
| R3603 | 30 | 20 | AGACUAAUA | AGGAAUACAU | AGACUAAUAGAUU |
| | | | GAUUGCUCC | GGUACACGUU | GCUCCUUACGAGG |
| | | | UUACGAGGA | (SEQ ID NO: | AGACAGGAAUACA |
| | | | GAC (SEQ ID | 1498) | UGGUACACGUU |
| | | | NO: 1471) | | (SEQ ID NO: 1520) |
| R3604 | 29 | 20 | GACUAAUAG | AGGAAUACAU | GACUAAUAGAUUG |
| | | | AUUGCUCCU | GGUACACGUU | CUCCUUACGAGGA |
| | | | UACGAGGAG | (SEQ ID NO: | GACAGGAAUACAU |
| | | | AC (SEQ ID | 1498) | GGUACACGUU (SEQ |
| | | | NO: 1472) | | ID NO: 1521) |
| R3605 | 28 | 20 | ACUAAUAGA | AGGAAUACAU | ACUAAUAGAUUGC |
| | | | UUGCUCCUU | GGUACACGUU | UCCUUACGAGGAG |
| | | | ACGAGGAGA | (SEQ ID NO: | ACAGGAAUACAUG |
| | | | C (SEQ ID NO: | 1498) | GUACACGUU (SEQ |
| | | | 1473) | | ID NO: 1522) |
| R3606 | 27 | 20 | CUAAUAGAU | AGGAAUACAU | CUAAUAGAUUGCU |
| | | | UGCUCCUUA | GGUACACGUU | CCUUACGAGGAGA |
| | | | CGAGGAGAC | (SEQ ID NO: | CAGGAAUACAUGG |
| | | | (SEQ ID NO: | 1498) | UACACGUU (SEQ ID |
| | | | 1474) | | NO: 1523) |
| R3607 | 26 | 20 | UAAUAGAUU | AGGAAUACAU | UAAUAGAUUGCUC |
| | | | GCUCCUUAC | GGUACACGUU | CUUACGAGGAGAC |
| | | | GAGGAGAC | (SEQ ID NO: | AGGAAUACAUGGU |
| | | | (SEQ ID NO: | 1498) | ACACGUU (SEQ ID |
| | | | 1475) | | NO: 1524) |
| R3608 | 25 | 20 | AAUAGAUUG | AGGAAUACAU | AAUAGAUUGCUCC |
| | | | CUCCUUACG | GGUACACGUU | UUACGAGGAGACA |
| | | | AGGAGAC | AGGAAUACAU | GGAAUACAUGGUA |
| | | | (SEQ ID NO: | GGUACACGUU | CACGUU (SEQ ID |
| | | | 1476) | (SEQ ID NO: | NO: 1525) |
| | | | | 2487) | |
| R3609 | 24 | 20 | AUAGAUUGC | AGGAAUACAU | AUAGAUUGCUCCU |
| | | | UCCUUACGA | GGUACACGUU | UACGAGGAGACAG |
| | | | GGAGAC (SEQ | AGGAAUACAU | GAAUACAUGGUAC |
| | | | ID NO: 1477) | GGUACACGUU | ACGUU (SEQ ID |
| | | | | (SEQ ID NO: | NO: 1526) |
| | | | | 2487) | |
| R3610 | 23 | 20 | UAGAUUGCU | AGGAAUACAU | UAGAUUGCUCCUU |
| | | | CCUUACGAG | GGUACACGUU | ACGAGGAGACAGG |
| | | | GAGAC (SEQ | AGGAAUACAU | AAUACAUGGUACA |
| | | | ID NO: 1478) | GGUACACGUU | CGUU (SEQ ID |
| | | | | (SEQ ID NO: | NO: 1527) |
| | | | | 2487) | |
| R3611 | 22 | 20 | AGAUUGCUC | AGGAAUACAU | AGAUUGCUCCUUA |
| | | | CUUACGAGG | GGUACACGUU | CGAGGAGACAGGA |
| | | | AGAC (SEQ ID | AGGAAUACAU | AUACAUGGUACAC |
| | | | NO: 1479) | GGUACACGUU | GUU (SEQ ID |
| | | | | (SEQ ID NO: | NO: 1528) |
| | | | | 2487) | |
| R3612 | 21 | 20 | GAUUGCUCC | AGGAAUACAU | GAUUGCUCCUUAC |
| | | | UUACGAGGA | GGUACACGUU | GAGGAGACAGGAA |
| | | | GAC (SEQ ID | AGGAAUACAU | UACAUGGUACACG |
| | | | NO: 1480) | GGUACACGUU | UU (SEQ ID NO: 1529) |
| | | | | (SEQ ID NO: | |
| | | | | 2487) | |
| R3613 | 20 | 20 | AUUGCUCCU | AGGAAUACAU | AUUGCUCCUUACG |
| | | | UACGAGGAG | GGUACACGUU | AGGAGACAGGAAU |
| | | | AC (SEQ ID | AGGAAUACAU | ACAUGGUACACGU |
| | | | NO: 1481) | GGUACACGUU | U (SEQ ID NO: 1530) |
| | | | | (SEQ ID NO: | |
| | | | | 2487) | |

### Example 34

[0537] Identification of Optimal Guide RNAs for CasΦ Polypeptide-Mediated Genome Editing in Primary Cells

[0538] The present example shows identification of the best performing gRNAs that target TRAC, B2M and programmed cell death protein 1 (PD1) in T cells. In this study, CasΦ.12 polypeptides (SEQ ID NO: 107) were incubated with different gRNAs (shown in Table 14) at room temperature for 10 minutes to form RNP complexes. T cells were resuspended at 5×10⁵ cells/20 μL in electroporation solution (Lonza) and an Amaxa 4D Nucleofector with pulse code EH115 was used to nucleofect the cells Immediately after nucleofection, 80 μl pre-warmed culture medium was added to each well. The cells were then left in the cuvette plate for 10 minutes before transfer to the culture plate. After 48 hours, DNA was extracted from half of the cells and PCR was performed to detect the frequency of indels. The rest of the cells were cultured until Day 5, and were then collected for flow cytometry to detect the frequency of TRAC or B2M knockout. FIG. 29A and FIG. 29B show exemplary gRNAs for targeting TRAC. FIG. 29B and FIG. 29C show exemplary gRNAs for targeting B2M. FIG. 29E shows exemplary gRNAs for targeting PD1. Additionally, this example demonstrates that a guide RNAs targeting a non-coding region can mediate gene knockout. For example, R3007, R2995, R2992 and R3014 target non-coding regions of the PD1 gene. The screening for gRNAs targeting TRAC is shown in FIG. 29F and for gRNAs targeting B2M is shown in FIG. 29H. Flow cytometry plots of exemplary gRNAs targeting TRAC are shown in FIG. 29G and of exemplary gRNAs targeting B2M in FIG. 29I.

TABLE 14

| Name | Target | Spacer sequence (5′→3′) |
|---|---|---|
| R3041 | TRAC | UCCCACAGAUAUCCAGAACC (SEQ ID NO: 2470) |
| R3042 | TRAC | GAGUCUCUCAGCUGGUACAC (SEQ ID NO: 1436) |
| R3043 | TRAC | AGAGUCUCUCAGCUGGUACA (SEQ ID NO: 2471) |
| R3061 | TRAC | AAGUCCAUAGACCUCAUGUC (SEQ ID NO: 2472) |
| R3063 | TRAC | AAGAGCAACAGUGCUGUGGC (SEQ ID NO: 2473) |
| R3066 | TRAC | GUUGCUCCAGGCCACAGCAC (SEQ ID NO: 2474) |
| R3068 | TRAC | GCACAUGCAAAGUCAGAUUU (SEQ ID NO: 2475) |
| R3069 | TRAC | GCAUGUGCAAACGCCUUCAA (SEQ ID NO: 2476) |
| R3081 | TRAC | CUAAAAGGAAAAACAGACAU (SEQ ID NO: 2477) |
| R3141 | TRAC | CUCGACCAGCUUGACAUCAC (SEQ ID NO: 2478) |
| R3088 | B2M | AUAUAAGUGGAGGCGUCGCG (SEQ ID NO: 2479) |
| R3091 | B2M | GGGCCGAGAUGUCUCGCUCC (SEQ ID NO: 1429) |
| R3094 | B2M | UGGCCUGGAGGCUAUCCAGC (SEQ ID NO: 2480) |
| R3119 | B2M | AAGUUGACUUACUGAAGAAU (SEQ ID NO: 2481) |
| R3132 | B2M | AGCAAGGACUGGUCUUUCUA (SEQ ID NO: 2482) |
| R3149 | B2M | AGUGGGGGUGAAUUCAGUGU (SEQ ID NO: 2483) |
| R3150 | B2M | CAGUGGGGGUGAAUUCAGUG (SEQ ID NO: 1434) |
| R3155 | B2M | GGCUGUGACAAAGUCACAUG (SEQ ID NO: 2484) |
| R3156 | B2M | GUCACAGCCCAAGAUAGUUA (SEQ ID NO: 2485) |
| R3157 | B2M | UCACAGCCCAAGAUAGUUAA (SEQ ID NO: 2486) |
| R2946 | PD1 | UGUGACACGGAAGCGGCAGU (SEQ ID NO: 263) |
| R2992 | PD1 | GGGGCUGGUUGGAGAUGGCC (SEQ ID NO: 309) |
| R2995 | PD1 | GAGCAGCCAAGGUGCCCCUG (SEQ ID NO: 312) |
| R3007 | PD1 | ACACAUGCCCAGGCAGCACC (SEQ ID NO: 324) |
| R3014 | PD1 | AGGCCCAGCCAGCACUCUGG (SEQ ID NO: 331) |

### Example 35

[0539] RNP and mRNA Delivery of Caste Polypeptides

[0540] This example illustrates that CasΦ.12 can be delivered to primary cells as mRNA or as an RNP complex. In one study, RNP complexes were formed using CasΦ.12 protein (0, 100, 200 or 400 pmol) (SEQ ID NO: 107) and gRNAs (0, 400 or 800 pmol) targeting B2M or TRAC. RNP complexes were added to T cells. T cells were nucleofected using the Amaxa P3 kit and Amaxa 4D 96-well electroporation system with pulse code EH115. Cells were harvested for flow cytometry to determine the percentage of B2M or TRAC knockout cells, and genomic DNA was extracted to detect the frequency of indel mutations. As shown in FIG. 30A, a distinct population of B2M-negative cells was detected in T cells transfected with CasΦ.12 RNP complex targeting B2M. A distinct population of TRAC-negative cells was detected in in T cells transfected with CasΦ.12 RNP complex targeting TRAC, and shown in FIG. 30B. Quantification of the percentage of B2M knockout cells is shown in FIG. 30C and quantification of the percentage of TRAC knockout cells is shown in FIG. 30D. A high frequency of indel mutations was also seen after delivery of RNP complexes. As shown in FIG. 30E, —55% indel mutations was detected when RNP complexes targeting B2M were formed using 400 pmol protein and 800 pmol guide RNA. A similar frequency of indel mutations was detected when RNP complexes targeting TRAC were formed using the same conditions, as illustrated in FIG. 30F.

[0541] In a second study, CasΦ.12 mRNA was delivered to T cells with a gRNA targeting the B2M gene. For nucleofection, T cells were resuspended in BTXpress electroporation medium (5×10⁵ cells per well) and mixed with CasΦ.12 mRNA and 500 pmol gRNA. Cells were collected on Day 2 for extraction of genomic DNA, and the frequency of indel mutations was determined. As shown in FIG. 30G, delivery of CasΦ.12 mRNA and gRNA resulted in a high frequency of indel mutations. This was at a comparable level to genome editing with delivery of Cas9 mRNA. Further data from this study are shown in FIG. 30I and FIG. 30J. FIG. 30I shows the frequency of indel mutations and functional knockout, as assessed by flow cytometry, of the B2M gene induced by either CasΦ.12 or Cas9 targeting the same site. FIG. 30J shows the distribution of the size of indel mutations induced by CasΦ.12 or Cas9 determined by NGS analysis. CasΦ.12 predominantly induced larger deletion mutations whereas Cas9 induced mostly small 1bp InDels. This data further confirms the ability of CasΦ.12 to mediate genome editing at the B2M locus.

### Example 36

[0542] gRNA Processing by CasΦ Polypeptides in Mammalian Cells

[0543] This example illustrates the ability of CasΦ polypeptides to process gRNA in mammalian cells. In this study, HEK293T cells were transfected with crRNA and expression plasmids encoding CasΦ.12 (SEQ ID NO: 107) using lipofectamine on day 0. The crRNA had the repeat sequence (the region that binds to CasΦ.12) CTTTCAAGACTAATAGATTGCTCCTTACGAGGAGAC (SEQ ID NO: 54). To determine the nature of the crRNAs expressed in the HEK293T cells, the microRNA species in the HEK293T cells were analyzed by next generation sequencing. After 2 days, miRNA was extracted using the mirVANA kit. RNA was treated with recombinant Shrimp Alkaline Phosphatase (rSAP) to remove all the phosphates from the 5′ and 3′ ends of the RNA. PNK phosphorylation was then performed to add phosphate back to the 5′ ends in preparation for adaptor ligation to the RNA. RNA was then mixed with 3′ SR Adaptor for Illumina, followed by 3′ ligation enzyme mix and incubated for 1 hour at 25° C. in a thermal cycler. The reverse transcription primer was then hybridized to prevent adaptor-dimer formation. The SR RT primer hybridizes to the excess of 3′ SR Adaptor (that remains free after the 3′ ligation reaction) and transforms the single stranded DNA adaptor into a double-stranded DNA molecule. Double-stranded DNAs are not substrates for ligation mediated by T4 RNA Ligase 1 and therefore do not ligate to the 5′ SR. The RNA-ligation mixture from the previous step was mixed with SR RT primer for Illumina and placed in a thermocycler for the following program: 5 minutes at 75° C., 15 minutes at 37° C., 15 minutes at 25° C., hold at 4° C. The RNA-ligation mixture was then incubated with 5′ SR adaptor for 1 hour at 25° C. in a thermal cycler. Finally, RNA was reverse transcribed using ProtoScript II Reverse Transcriptase and amplified for PCR. The sample was then analyzed by next generation sequencing.

[0544] As shown in FIG. 31 the major crRNA molecule detected by sequence analysis was 24 nucleotides long (ATAGATTGCTCCTTACGAGGAGAC (SEQ ID NO: 1531) which is 12 nucleotides shorter than the full length repeat sequence (CTTTCAAGACTAATAGATTGCTCCTTACGAGGAGAC (SED ID NO: 54)) that was delivered to the HEK293T cells. This demonstrates how CasΦ.12 can process the repeat region of its crRNA in mammalian cells.

### Example 37

[0545] CasΦ Polypeptide Cleavage Generates 5′ Overhangs

[0546] This example illustrates different CasΦ polypeptide-induced cleavage patterns. In this study, CasΦ polypeptides (CasΦ.12, CasΦ.45, CasΦ.43, CasΦ.39. CasΦ.37, CasΦ.33, CasΦ.32, CasΦ.30, CasΦ.28, CasΦ.25, CasΦ.24, CasΦ.22, CasΦ.20, CasΦ.18) were complexed with a crRNA to form RNPs. The RNPs were then used in cleavage reactions with plasmid DNA comprising a target sequence and a PAM (GTTG). The cleavage reaction was carried out at 37° C. and had a duration of 15 minutes. The cleavage products were then analyzed by gel electrophoresis. As shown in FIG. 32A, the majority of CasΦ polypeptides generated a linear product from a plasmid target, whilst some CasΦ polypeptides introduced nicks into the plasmid DNA.

[0547] FIG. 32B shows a schematic of the cut sites on the target and non-target strand of a double-stranded target nucleic acid. The nature of the cleavage patterns resulting from the location of the cut sites on the target and non-target strands was investigated by sequence analysis, as shown in FIG. 32C and represented in FIG. 32D. These data show that the cleavage pattern following CasΦ polypeptide mediated cleavage of target nucleic acid is a staggered cut comprising 5′ overhangs. FIG. 32E shows a table of cut sites and overhangs of the different CasΦ polypeptides. The “#bp overlap” corresponds to the length of the 5′ overhang for each CasΦ polypeptide. For comparison, Cpf1 introduces a staggered double-stranded DNA break with a 4- or 5-nucleotide 5′ overhang (Zetsche et. al 2015 Cell).

### Example 38

[0548] Multiplex Genome Editing with CasΦ Polypeptides

[0549] This example illustrates the ability of CasΦ RNP complexes to knockout multiple genes simultaneously. In this study, gRNAs targeting B2M, TRAC and PDCD1 (provided in Table 15) were incubated with CasΦ.12 (SEQ ID NO: 12) for 10 minutes at room temperature to form B2M, TRAC, and PDC1 targeting RNPs, respectively. The B2M targeting RNPs, TRAC targeting RNPs, PDCD1 targeting RNPs and combinations thereof were added to T cells. T cells were resuspended at 5×10⁵ cells/20 μL in Nucleofection P3 solution and an Amaxa 4D 96-well electroporation system with pulse code EH115 was used to nucleofect the cells. Immediately after nucleofection, 85 μl pre-warmed culture medium was added to each well. The cells were then left in the cuvette plate for 10 minutes before transfer to the culture plate. On Day 3, genomic DNA was extracted and sent for NGS sequencing and the % indel was measured with a positive % indel being indicative of % knockout. On Day 5, cells were harvested for flow cytometry and the % knockout was measured with fluorescently labeled antibodies to TRAC and B2M (antibody to PDCD1 unavailable). % indel results are presented in Table 16 and flow cytometry data presented in Table 17. Corresponding flow cytometry panels are shown in FIG. 33.

TABLE 15

| Description | SEQ ID | Sequence |
|---|---|---|
| B2M gRNA | 1532 | CUUUCAAGACUAAUAGAUUGCUCCUUACG |
| (R3132) | | AGGAGACAGCAAGGACUGGUCUUUCUA |
| TRAC gRNA | 1432 | CUUUCAAGACUAAUAGAUUGCUCCUUACG |
| (R3042) | | AGGAGACGAGUCUCUCAGCUGGUACAC |
| PDCD1 gRNA | 791 | CUUUCAAGACUAAUAGAUUGCUCCUUACG |
| (R2925) | | AGGAGACUAGCACCGCCCAGACGACUG |

TABLE 16

| Description | RNP Guide ID(s) | Amplicon | % INDEL |
|---|---|---|---|
| TRAC single KO | R3042 | TRAC | 77.6% |
| B2M single KO | R3132 | B2M | 85.5% |
| PDCD1 single KO | R2925 | PDCD1 | 44.6% |
| TRAC, B2M double KO | R3132 & R3042 | TRAC | 58.8% |
| TRAC, B2M double KO | R3132 & R3042 | B2M | 61.2% |
| TRAC, B2M, PDCD1 | R3132, R3042, | TRAC | 59.2% |
| triple KO | R2925 | | |
| TRAC, B2M, PDCD1 | R3132, R3042, | B2M | 69.4% |
| triple KO | R2925 | | |
| TRAC, B2M, PDCD1 | R3132, R3042, | PDCD1 | 42.1% |
| triple KO | R2925 | | |

TABLE 17

| | B2M+ | B2M+, | B2M−, | B2M−, |
|---|---|---|---|---|
| gRNA | CD3− | CD3+ | CD3+ | CD3− |
| TRAC | 94 | 5.91 | 0.00418 | 0.1 |
| B2M | 0.051 | 8.65 | 90.7 | 0.59 |
| TRAC + B2M | 4.2 | 4.89 | 4.01 | 86.9 |
| TRAC + B2M + | 4.74 | 14.1 | 4.33 | 76.8 |
| PDCD1 | | | | |

### Example 39

[0550] Genome Editing with CasΦ Polypeptides Mediates Efficient Editing of PCSK9 in Mouse Hepatoma Cells

[0551] The present example shows that CasΦ.12 RNP complexes are highly effective at mediating editing the PCSK9 gene. In this study, 95 CasΦ gRNAs targeting PCSK9 (sequences shown in Tables E and Q), were incubated with CasΦ.12 (SEQ ID NO: 12) to form RNP complexes. Positive control RNP complexes were also formed using Cas9 and a gRNA. Hepa1-6 mouse hepatoma cells (100,000 cells) were resuspended in SF solution (Lonza) and nucleofected with CasΦ RNPs (250 pmoles) or the control Cas9 RNPs (60 pmoles) using program CM-137 or CM-148 (Amaxa nucleofector). Cells were collected after 48 hours, genomic DNA was extracted and the frequency of indel mutations was determined using NGS. FIG. 34 shows that CasΦ.12 is a highly effective genome editing tool, with an indel frequency of up to 48% induced by CasΦ.12 RNP complexes. Whereas, the maximum indel frequency induced by Cas9 was only about 22%.

### Example 40

[0552] Adeno-Associated Virus Encoding CasΦ.12 Facilitates Genome Editing

[0553] This example shows that a CasΦ.12 plasmid, including both CasΦ polypeptide sequence and gRNA sequence, sometimes called an all-in-one, can be used to facilitate genome editing. In this study, the crRNAs (sequences shown in Tables E and Q) from the initial RNP screen were chosen and truncations of these crRNAs were generated with repeat lengths of 36, 25, 20, or 19 nucleotides in combination with spacer lengths of 20, 17, or 16 nucleotides. Each crRNA was then cloned into an AAV vector consisting of U6 promoter to drive crRNA expression, intron-less EF1alpha short (EFS) promoter driving CasΦ expression, PolyA signal, and 1 kb stuffer sequence genomic. Hepa1-6 mouse hepatoma cells were nucleofected with 10 μg of each AAV plasmid. After 72 hours, genomic DNA was extracted and the frequency of indel mutations was determined using NGS. FIG. 35A shows a plasmid map of the adeno-associated virus (AAV) encoding the CasΦ polypeptide sequence and gRNA sequence. FIG. 35D shows the frequency of CasΦ.12 induced indel mutations in Hepa1-6 cells transduced with 10 μg of each AAV plasmid. gRNAs containing repeat sequences of 19, 20, 25 or 36 nucleotides and spacer sequences of 16, 17 or 20 nucleotides were used in this study. In the graph legend, repeat and spacer lengths are indicated as the number of nucleotides in the repeat followed by the number of nucleotides in the spacer, eg 20-17 has a repeat length of 20 nucleotides and a spacer length of 17 nucleotides. The frequency of indel mutations is comparable to that of Cas9. FIG. 35E and FIG. 35F show the frequency of CasΦ.12 induced indel mutations with different gRNA containing repeat and spacer sequences of different lengths (indicated as in FIG. 35F with repeat length followed by spacer length). This study demonstrates that the all-in-one vector method of CasΦ.12 mediated genome editing is robust across different gRNA sequences and with gRNAs of different repeat and spacer lengths.

[0554] AAV vectors are a leading platform for delivery of gene therapy for treatment of human disease (Wang et al., (2019) Nature Reviews Drug Discovery). One of the limitations of viral vector delivery of CRISPR/Cas9 is the size of Cas9. AAVs are roughly 20 nm, allowing for 4.5 kb genomic material to be packaged within it. This makes packaging Cas9 and a gRNA (˜4.2 kB) with any additional elements such as multiple gRNAs or a donor polynucleotide for HDR challenging (Lino et al., (2018), Drug Delivery). Whereas CasΦ is much smaller, allowing all of the components of the CRISPR system to be packaged in one viral vector.

### Example 41

[0555] Optimization of Lipid Nanoparticle Delivery of CasΦ

[0556] This example describes the optimization of lipid nanoparticle (LNP) delivery of CasΦ mRNA and gRNA. In this study, the encapsulation efficiency of LNPs was optimized by testing different amine group to phosphate group ratio (N/P) of LNPs containing CasΦ mRNA and gRNA. An LNP kit from Precision Nanosystems (GenVoy-ILM™) was used to generate LNPs with different N/P ratios. LNPs were then dropped into HEK293T cells. Genomic DNA was extracted and the frequency of indel mutations was determined using NGS. The gRNA used in this study was R2470 with 2′O-methyl on the first three 5′ and last three 3′ nucleotides and phosphorothioate bonds in between the first three 5′ nucleotides and in between the last two 3′ nucleotides. The sequence of R2470 from 5′ to 3′ is 42256-779_601_SL. The mRNA was generated using T7 messenger mRNA IVT kit. As shown in FIG. 36, indel mutations were detected following the use of a range of N/P ratios.

[0557] LNPs are one of the most clinically advanced non-viral delivery systems for gene therapy. LNPs have many properties that make them ideal candidates for delivery of nucleic acids, including ease of manufacture, low cytotoxicity and immunogenicity, high effiency of nucleic acid encapsulation and cell transfection, multidosing capabilities and flexibility of design (Kulkarni et al., (2018) Nucleic Acid Therapeutics).

### Example 42

[0558] Genome Editing in Hematopoietic Stem Cells with CasΦ Polypeptides

[0559] This example demonstrates CasΦ-mediated genome editing of CD34⁺ hematopoietic stem cells (HSCs). HSCs are stem cells that differentiate to give rise blood cells, such as T and B lymphocytes, erythrocytes, monocytes and macrophages. HSCs are important cells for future stem cell therapies as they have the potential to be used to treat genetic blood cell diseases (Morgan et al. (2017), Cell Stem Cell).

[0560] In this study human CD34⁺ cells were grown in XVIVO10 media (+5% FBS, +1X CC110) for three days. On the third day, the cells were nucleofected using the Lonza P3 kit with either RNP containing CasΦ.12 polypeptides complexed with B2M-targeting guide R3132 (42256-779_601_SL), or a mixture of CasΦ.12 mRNA with B2M-targeting guide. Cells were collected after 3 days, genomic DNA was purified and the frequency of indel mutations at the B2M locus was analyzed by NGS. As shown in FIG. 37, CasΦ.12 is an effective tool for genome editing when CasΦ.12 is delivered to cells as CasΦ.12 RNP complexes or CasΦ.12 mRNA.

[0561] This example illustrates the utility of CasΦ polypetides as genome editing tools in stem cells, such as HSCs.

### Example 43

[0562] Genome Editing in Induced Pluripotent Stem Cells with CasΦ Polypeptides

[0563] This example demonstrates CasΦ-mediated genome editing of induced pluripotent stem cells (iPSCs). iPSCs are pluripotent stem cells that are generated from somatic cells. They can propagate indefinitely and give rise to any cell type in the body. These features make iPSCs a powerful tool for researching human disease and provide a promising prospect for cell therapies for a range of medical conditions. iPSCs can be generated in a patient-specific manner and used in autologous transplant, thereby overcoming complications of rejection by the host immune system (Moradi et al. (2019), Stem Cell Research & Therapy).

[0564] In this study, high quality WTC-11 iPSCs were harvested as single cells using Accutase treatment for 5 minutes. RNP complexes were formed using CasΦ.12 polypeptides and gRNAs targeting either the B2M locus or targeting a CIITA locus (sequences shown in Table 19). RNP complexes were formed using 2:1 gRNA:CasΦ.12 RNP (1000 pmol gRNA+500 pmol Cas12Φ.12) and incubating at room temperature for approximately 15 minutes. WTC-11 iPSCs (200,000 cells) were resuspended in 20 uL of P3 nucleofection solution per reaction and 40 uL of cell suspension was added to each RNP tube. Half of the volume of each RNP/cell suspension mixture was added to the Lonza 96 well shuttle and nucleofection was performed using the program CD118. To recover the transfected cells, 80 μL, of warm StemFlex media supplemented with 2 μM of Thiazovivin was added to the wells of the shuttle. The entire volume of the shuttle well was transferred to a 96 well plate previously coated with 0.337 mg/mL Matrigel containing 100 μL of 2 μM of Thiazovivin. Cells were allowed to recover for 24 hours in 3TC incubator with humidity control. Cells were confluent 48 hours post-transfection, and single-cell passaged using Accutase. Genomic DNA was extracted using KingFisher Tissue and DNA kit. NGS library preparation was performed using in house protocols and the frequency of indel mutations was quantified using Crispresso. As shown in FIG. 38, effective genome editing at the B2M and CIITA loci was achieved with CasΦ.12 RNP complexes in iPSCs.

[0565] This example demonstrates the utility of CasΦ as genome editing tools in iPSCs.

TABLE 19

| | | | SEQ |
|---|---|---|---|
| | | | ID |
| Name | Target | Sequence | NO |
| R3132 | B2M | AUUGCUCCUUACGAGGAGACAGCAAGGACU | 2488 |
| | | GGUCUUU | |
| R4504_CasPhi12_S | CIITA | AUUGCUCCUUACGAGGAGACGGGCUCUGAC | 1722 |
| | | AGGUAGG | |
| R5406_CasPhi12 | CIITA | CUUUCAAGACUAAUAGAUUGCUCCUUACGA | 2222 |
| | | GGAGACGGGUCAAUGCUAGGUACUGC | |

### Example 44

[0566] Genome Editing with CasΦ Polypeptides Mediates Efficient Editing of CIITA Locus

[0567] This example demonstrates CasΦ-mediated genome editing of the CIITA locus. In this study, RNP complexes were formed using CasΦ polypeptides and gRNAs targeting CIITA (sequences shown in Tables D and O). K562 cells were nucleofected with RNP complexes (250 pmol) using Lonza nucleofection protocols. Cells were harvested after 48 hours, genomic DNA was isolated and the frequency of indel mutations was evaluated using NGS analysis (MiSeq, Illumina). As shown in FIG. 39, effective genome editing of the CIITA locus was achieved using CasΦ RNP complexes.

[0568] While preferred embodiments of the present invention have been shown and described herein, it will be apparent to those skilled in the art that such embodiments are provided by way of example only. Numerous variations, changes, and substitutions will now occur to those skilled in the art without departing from the invention. It should be understood that various alternatives to the embodiments of the invention described herein may be employed in practicing the invention. It is intended that the following claims define the scope of the invention and that methods and structures within the scope of these claims and their equivalents be covered thereby.

The application's sequence listing, which the Patent Office published only in electronic form, follows.

SEQUENCE LISTING (2490 sequences)

SEQ ID NO: 1 - protein, 707 aa, unidentified
  REGION 1..707: note = Description of Unknown:CasPhi sequence
MADTPTLFTQFLRHHLPGQRFRKDILKQAGRILANKGEDATIAFLRGKSEESPPDFQPPVKCPIIACSRPLTEWPIYQASVAIQGYVYGQSLAEFEASDPGCSKDGLLGWFDKTGVCTDYFSVQGLNLIFQNARKRYIGVQTKVTNRNEKRHKKLKRINAKRIAEGLPELTSDEPESALDETGHLIDPPGLNTNIYCYQQVSPKPLALSEVNQLPTAYAGYSTSGDDPIQPMVTKDRLSISKGQPGYIPEHQRALLSQKKHRRMRGYGLKARALLVIVRIQDDWAVIDLRSLLRNAYWRRIVQTKEPSTITKLLKLVTGDPVLDATRMVATFTYKPGIVQVRSAKCLKNKQGSKLFSERYLNETVSVTSIDLGSNNLVAVATYRLVNGNTPELLQRFTLPSHLVKDFERYKQAHDTLEDSIQKTAVASLPQGQQTEIRMWSMYGFREAQERVCQELGLADGSIPWNVMTATSTILTDLFLARGGDPKKCMFTSEPKKKKNSKQVLYKIRDRAWAKMYRTLLSKETREAWNKALWGLKRGSPDYARLSKRKEELARRCVNYTISTAEKRAQCGRTIVALEDLNIGFFHGRGKQEPGWVGLFTRKKENRWLMQALHKAFLELAHHRGYHVIEVNPAYTSQTCPVCRHCDPDNRDQHNREAFHCIGCGFRGNADLDVATHNIAMVAITGESLKRARGSVASKTPQPLAAE

SEQ ID NO: 2 - protein, 757 aa, unidentified
  REGION 1..757: note = Description of Unknown:CasPhi sequence
MPKPAVESEFSKVLKKHFPGERFRSSYMKRGGKILAAQGEEAVVAYLQGKSEEEPPNFQPPAKCHVVTKSRDFAEWPIMKASEAIQRYIYALSTTERAACKPGKSSESHAAWFAATGVSNHGYSHVQGLNLIFDHTLGRYDGVLKKVQLRNEKARARLESINASRADEGLPEIKAEEEEVATNETGHLLQPPGINPSFYVYQTISPQAYRPRDEIVLPPEYAGYVRDPNAPIPLGVVRNRCDIQKGCPGYIPEWQREAGTAISPKTGKAVTVPGLSPKKNKRMRRYWRSEKEKAQDALLVTVRIGTDWVVIDVRGLLRNARWRTIAPKDISLNALLDLFTGDPVIDVRRNIVTFTYTLDACGTYARKWTLKGKQTKATLDKLTATQTVALVAIDLGQTNPISAGISRVTQENGALQCEPLDRFTLPDDLLKDISAYRIAWDRNEEELRARSVEALPEAQQAEVRALDGVSKETARTQLCADFGLDPKRLPWDKMSSNTTFISEALLSNSVSRDQVFFTPAPKKGAKKKAPVEVMRKDRTWARAYKPRLSVEAQKLKNEALWALKRTSPEYLKLSRRKEELCRRSINYVIEKTRRRTQCQIVIPVIEDLNVRFFHGSGKRLPGWDNFFTAKKENRWFIQGLHKAFSDLRTHRSFYVFEVRPERTSITCPKCGHCEVGNRDGEAFQCLSCGKTCNADLDVATHNLTQVALTGKTMPKREEPRDAQGTAPARKTKKASKSKAPPAEREDQTPAQEPSQTS

SEQ ID NO: 3 - protein, 765 aa, unidentified
  REGION 1..765: note = Description of Unknown:CasPhi sequence
MYILEMADLKSEPSLLAKLLRDRFPGKYWLPKYWKLAEKKRLTGGEEAACEYMADKQLDSPPPNFRPPARCVILAKSRPFEDWPVHRVASKAQSFVIGLSEQGFAALRAAPPSTADARRDWLRSHGASEDDLMALEAQLLETIMGNAISLHGGVLKKIDNANVKAAKRLSGRNEARLNKGLQELPPEQEGSAYGADGLLVNPPGLNLNIYCRKSCCPKPVKNTARFVGHYPGYLRDSDSILISGTMDRLTIIEGMPGHIPAWQREQGLVKPGGRRRRLSGSESNMRQKVDPSTGPRRSTRSGTVNRSNQRTGRNGDPLLVEIRMKEDWVLLDARGLLRNLRWRESKRGLSCDHEDLSLSGLLALFSGDPVIDPVRNEVVFLYGEGIIPVRSTKPVGTRQSKKLLERQASMGPLTLISCDLGQTNLIAGRASAISLTHGSLGVRSSVRIELDPEIIKSFERLRKDADRLETEILTAAKETLSDEQRGEVNSHEKDSPQTAKASLCRELGLHPPSLPWGQMGPSTTFIADMLISHGRDDDAFLSHGEFPTLEKRKKFDKRFCLESRPLLSSETRKALNESLWEVKRTSSEYARLSQRKKEMARRAVNFVVEISRRKTGLSNVIVNIEDLNVRIFHGGGKQAPGWDGFFRPKSENRWFIQAIHKAFSDLAAHHGIPVIESDPQRTSMTCPECGHCDSKNRNGVRFLCKGCGASMDADFDAACRNLERVALTGKPMPKPSTSCERLLSATTGKVCSDHSLSHDAIEKAS

SEQ ID NO: 4 - protein, 766 aa, unidentified
  REGION 1..766: note = Description of Unknown:CasPhi sequence
MEKEITELTKIRREFPNKKFSSTDMKKAGKLLKAEGPDAVRDFLNSCQEIIGDFKPPVKTNIVSISRPFEEWPVSMVGRAIQEYYFSLTKEELESVHPGTSSEDHKSFFNITGLSNYNYTSVQGLNLIFKNAKAIYDGTLVKANNKNKKLEKKFNEINHKRSLEGLPIITPDFEEPFDENGHLNNPPGINRNIYGYQGCAAKVFVPSKHKMVSLPKEYEGYNRDPNLSLAGFRNRLEIPEGEPGHVPWFQRMDIPEGQIGHVNKIQRFNFVHGKNSGKVKFSDKTGRVKRYHHSKYKDATKPYKFLEESKKVSALDSILAIITIGDDWVVFDIRGLYRNVFYRELAQKGLTAVQLLDLFTGDPVIDPKKGVVTFSYKEGVVPVFSQKIVPRFKSRDTLEKLTSQGPVALLSVDLGQNEPVAARVCSLKNINDKITLDNSCRISFLDDYKKQIKDYRDSLDELEIKIRLEAINSLETNQQVEIRDLDVFSADRAKANTVDMFDIDPNLISWDSMSDARVSTQISDLYLKNGGDESRVYFEINNKRIKRSDYNISQLVRPKLSDSTRKNLNDSIWKLKRTSEEYLKLSKRKLELSRAVVNYTIRQSKLLSGINDIVIILEDLDVKKKFNGRGIRDIGWDNFFSSRKENRWFIPAFHKAFSELSSNRGLCVIEVNPAWTSATCPDCGFCSKENRDGINFTCRKCGVSYHADIDVATLNIARVAVLGKPMSGPADRERLGDTKKPRVARSRKTMKRKDISNSTVEAMVTA

SEQ ID NO: 5 - protein, 812 aa, unidentified
  REGION 1..812: note = Description of Unknown:CasPhi sequence
MDMLDTETNYATETPAQQQDYSPKPPKKAQRAPKGFSKKARPEKKPPKPITLFTQKHFSGVRFLKRVIRDASKILKLSESRTITFLEQAIERDGSAPPDVTPPVHNTIMAVTRPFEEWPEVILSKALQKHCYALTKKIKIKTWPKKGPGKKCLAAWSARTKIPLIPGQVQATNGLFDRIGSIYDGVEKKVTNRNANKKLEYDEAIKEGRNPAVPEYETAYNIDGTLINKPGYNPNLYITQSRTPRLITEADRPLVEKILWQMVEKKTQSRNQARRARLEKAAHLQGLPVPKFVPEKVDRSQKIEIRIIDPLDKIEPYMPQDRMAIKASQDGHVPYWQRPFLSKRRNRRVRAGWGKQVSSIQAWLTGALLVIVRLGNEAFLADIRGALRNAQWRKLLKPDATYQSLFNLFTGDPVVNTRTNHLTMAYREGVVNIVKSRSFKGRQTREHLLTLLGQGKTVAGVSFDLGQKHAAGLLAAHFGLGEDGNPVFTPIQACFLPQRYLDSLTNYRNRYDALTLDMRRQSLLALTPAQQQEFADAQRDPGGQAKRACCLKLNLNPDEIRWDLVSGISTMISDLYIERGGDPRDVHQQVETKPKGKRKSEIRILKIRDGKWAYDFRPKIADETRKAQREQLWKLQKASSEFERLSRYKINIARAIANWALQWGRELSGCDIVIPVLEDLNVGSKFFDGKGKWLLGWDNRFTPKKENRWFIKVLHKAVAELAPHRGVPVYEVMPHRTSMTCPACHYCHPTNREGDRFECQSCHVVKNTDRDVAPYNILRVAVEGKTLDRWQAEKKPQAEPDRPMILIDNQES

SEQ ID NO: 6 - protein, 812 aa, unidentified
  REGION 1..812: note = Description of Unknown:CasPhi sequence
MDMLDTETNYATETPAQQQDYSPKPPKKAQRAPKGFSKKARPEKKPPKPITLFTQKHFSGVRFLKRVIRDASKILKLSESRTITFLEQAIERDGSAPPDVTPPVHNTIMAVTRPFEEWPEVILSKALQKHCYALTKKIKIKTWPKKGPGKKCLAAWSARTKIPLIPGQVQATNGLFDRIGSIYDGVEKKVTNRNANKKLEYDEAIKEGRNPAVPEYETAYNIDGTLINKPGYNPNLYITQSRTPRLITEADRPLVEKILWQMVEKKTQSRNQARRARLEKAAHLQGLPVPKFVPEKVDRSQKIEIRIIDPLDKIEPYMPQDRMAIKASQDGHVPYWQRPFLSKRRNRRVRAGWGKQVSSIQAWLTGALLVIVRLGNEAFLADIRGALRNAQWRKLLKPDATYQSLFNLFTGDPVVNTRTNHLTMAYREGVVDIVKSRSFKGRQTREHLLTLLGQGKTVAGVSFDLGQKHAAGLLAAHFGLGEDGNPVFTPIQACFLPQRYLDSLTNYRNRYDALTLDMRRQSLLALTPAQQQEFADAQRDPGGQAKRACCLKLNLNPDEIRWDLVSGISTMISDLYIERGGDPRDVHQQVETKPKGKRKSEIRILKIRDGKWAYDFRPKIADETRKAQREQLWKLQKASSEFERLSRYKINIARAIANWALQWGRELSGCDIVIPVLEDLNVGSKFFDGKGKWLLGWDNRFTPKKENRWFIKVLHKAVAELAPHKGVPVYEVMPHRTSMTCPACHYCHPTNREGDRFECQSCHVVKNTDRDVAPYNILRVAVEGKTLDRWQAEKKPQAEPDRPMILIDNQES

SEQ ID NO: 7 - protein, 793 aa, unidentified
  REGION 1..793: note = Description of Unknown:CasPhi sequence
MSSLPTPLELLKQKHADLFKGLQFSSKDNKMAGKVLKKDGEEAALAFLSERGVSRGELPNFRPPAKTLVVAQSRPFEEFPIYRVSEAIQLYVYSLSVKELETVPSGSSTKKEHQRFFQDSSVPDFGYTSVQGLNKIFGLARGIYLGVITRGENQLQKAKSKHEALNKKRRASGEAETEFDPTPYEYMTPERKLAKPPGVNHSIMCYVDISVDEFDFRNPDGIVLPSEYAGYCREINTAIEKGTVDRLGHLKGGPGYIPGHQRKESTTEGPKINFRKGRIRRSYTALYAKRDSRRVRQGKLALPSYRHHMMRLNSNAESAILAVIFFGKDWVVFDLRGLLRNVRWRNLFVDGSTPSTLLGMFGDPVIDPKRGVVAFCYKEQIVPVVSKSITKMVKAPELLNKLYLKSEDPLVLVAIDLGQTNPVGVGVYRVMNASLDYEVVTRFALESELLREIESYRQRTNAFEAQIRAETFDAMTSEEQEEITRVRAFSASKAKENVCHRFGMPVDAVDWATMGSNTIHIAKWVMRHGDPSLVEVLEYRKDNEIKLDKNGVPKKVKLTDKRIANLTSIRLRFSQETSKHYNDTMWELRRKHPVYQKLSKSKADFSRRVVNSIIRRVNHLVPRARIVFIIEDLKNLGKVFHGSGKRELGWDSYFEPKSENRWFIQVLHKAFSETGKHKGYYIIECWPNWTSCTCPKCSCCDSENRHGEVFRCLACGYTCNTDFGTAPDNLVKIATTGKGLPGPKKRCKGSSKGKNPKIARSSETGVSVTESGAPKVKKSSPTQTSQSSSQSAP

SEQ ID NO: 8 - protein, 441 aa, unidentified
  REGION 1..441: note = Description of Unknown:CasPhi sequence
MNKIEKEKTPLAKLMNENFAGLRFPFAIIKQAGKKLLKEGELKTIEYMTGKGSIEPLPNFKPPVKCLIVAKRRDLKYFPICKASCEIQSYVYSLNYKDFMDYFSTPMTSQKQHEEFFKKSGLNIEYQNVAGLNLIFNNVKNTYNGVILKVKNRNEKLKKKAIKNNYEFEEIKTFNDDGCLINKPGINNVIYCFQSISPKILKNITHLPKEYNDYDCSVDRNIIQKYVSRLDIPESQPGHVPEWQRKLPEFNNTNNPRRRRKWYSNGRNISKGYSVDQVNQAKIEDSLLAQIKIGEDWIILDIRGLLRDLNRRELISYKNKLTIKDVLGFFSDYPIIDIKKNLVTFCYKEGVIQVVSQKSIGNKKSKQLLEKLIENKPIALVSIDLGQTNPVSVKISKLNKINNKISIESFTYRFLNEEILKEIEKYRKDYDKLELKLINEA

SEQ ID NO: 9 - protein, 812 aa, unidentified
  REGION 1..812: note = Description of Unknown:CasPhi sequence
MDMLDTETNYATETPSQQQDYSPKPPKKDRRAPKGFSKKARPEKKPPKPITLFTQKHFSGVRFLKRVIRDASKILKLSESRTITFLEQAIERDGSAPPDVTPPVHNTIMAVTRPFEEWPEVILSKALQKHCYALTKKIKIKTWPKKGPGKKCLAAWSARTKIPLIPGQVQATNGLFDRIGSIYDGVEKKVTNRNANKKLEYDEAIKEGRNPAVPEYETAYNIDGTLINKPGYNPNLYITQSRTPRLITEADRPLVEKILWQMVEKKTQSRNQARRARLEKAAHLQGLPVPKFVPEKVDRSQKIEIRIIDPLDKIEPYMPQDRMAIKASQDGHVPYWQRPFLSKRRNRRVRAGWGKQVSSIQAWLTGALLVIVRLGNEAFLADIRGALRNAQWRKLLKPDATYQSLFNLFTGDPVVNTRTNHLTMAYREGVVDIVKSRSFKGRQTREHLLTLLGQGKTVAGVSFDLGQKHAAGLLAAHFGLGEDGNPVFTPIQACFLPQRYLDSLTNYRNRYDALTLDMRRQSLLALTPAQQQEFADAQRDPGGQAKRACCLKLNLNPDEIRWDLVSGISTMISDLYIERGGDPRDVHQQVETKPKGKRKSEIRILKIRDGKWAYDFRPKIADETRKAQREQLWKLQKASSEFERLSRYKINIARAIANWALQWGRELSGCDIVIPVLEDLNVGSKFFDGKGKWLLGWDNRFTPKKENRWFIKVLHKAVAELAPHRGVPVYEVMPHRTSMTCPACHYCHPTNREGDRFECQSCHVVKNTDRDVAPYNILRVAVEGKTLDRWQAEKKPQAEPDRPMILIDNQES

SEQ ID NO: 10 - protein, 812 aa, unidentified
  REGION 1..812: note = Description of Unknown:CasPhi sequence
MDMLDTETNYATETPSQQQDYSPKPPKKDRRAPKGFSKKARPEKKPPKPITLFTQKHFSGVRFLKRVIRDASKILKLSESRTITFLEQAIERDGSAPPDVTPPVHNTIMAVTRPFEEWPEVILSKALQKHCYALTKKIKIKTWPKKGPGKKCLAAWSARTKIPLIPGQVQATNGLFDRIGSIYDGVEKKVTNRNANKKLEYDEAIKEGRNPAVPEYETAYNIDGTLINKPGYNPNLYITQSRTPRLITEADRPLVEKILWQMVEKKTQSRNQARRARLEKAAHLQGLPVPKFVPEKVDRSQKIEIRIIDPLDKIEPYMPQDRMAIKASQDGHVPYWQRPFLSKRRNRRVRAGWGKQVSSIQAWLTGALLVIVRLGNEAFLADIRGALRNAQWRKLLKPDATYQSLFNLFTGDPVVNTRTNHLTMAYREGVVNIVKSRSFKGRQTREHLLTLLGQGKTVAGVSFDLGQKHAAGLLAAHFGLGEDGNPVFTPIQACFLPQRYLDSLTNYRNRYDALTLDMRRQSLLALTPAQQQEFADAQRDPGGQAKRACCLKLNLNPDEIRWDLVSGISTMISDLYIERGGDPRDVHQQVETKPKGKRKSEIRILKIRDGKWAYDFRPKIADETRKAQREQLWKLQKASSEFERLSRYKINIARAIANWALQWGRELSGCDIVIPVLEDLNVGSKFFDGKGKWLLGWDNRFTPKKENRWFIKVLHKAVAELAPHRGVPVYEVMPHRTSMTCPACHYCHPTNREGDRFECQSCHVVKNTDRDVAPYNILRVAVEGKTLDRWQAEKKPQAEPDRPMILIDNQES

SEQ ID NO: 11 - protein, 761 aa, unidentified
  REGION 1..761: note = Description of Unknown:CasPhi sequence
MSNKTTPPSPLSLLLRAHFPGLKFESQDYKIAGKKLRDGGPEAVISYLTGKGQAKLKDVKPPAKAFVIAQSRPFIEWDLVRVSRQIQEKIFGIPATKGRPKQDGLSETAFNEAVASLEVDGKSKLNEETRAAFYEVLGLDAPSLHAQAQNALIKSAISIREGVLKKVENRNEKNLSKTKRRKEAGEEATFVEEKAHDERGYLIHPPGVNQTIPGYQAVVIKSCPSDFIGLPSGCLAKESAEALTDYLPHDRMTIPKGQPGYVPEWQHPLLNRRKNRRRRDWYSASLNKPKATCSKRSGTPNRKNSRTDQIQSGRFKGAIPVLMRFQDEWVIIDIRGLLRNARYRKLLKEKSTIPDLLSLFTGDPSIDMRQGVCTFIYKAGQACSAKMVKTKNAPEILSELTKSGPVVLVSIDLGQTNPIAAKVSRVTQLSDGQLSHETLLRELLSNDSSDGKEIARYRVASDRLRDKLANLAVERLSPEHKSEILRAKNDTPALCKARVCAALGLNPEMIAWDKMTPYTEFLATAYLEKGGDRKVATLKPKNRPEMLRRDIKFKGTEGVRIEVSPEAAEAYREAQWDLQRTSPEYLRLSTWKQELTKRILNQLRHKAAKSSQCEVVVMAFEDLNIKMMHGNGKWADGGWDAFFIKKRENRWFMQAFHKSLTELGAHKGVPTIEVTPHRTSITCTKCGHCDKANRDGERFACQKCGFVAHADLEIATDNIERVALTGKPMPKPESERSGDAKKSVGARKAAFKPEEDAEAAE

SEQ ID NO: 12 - protein, 717 aa, unidentified
  REGION 1..717: note = Description of Unknown:CasPhi sequence
MIKPTVSQFLTPGFKLIRNHSRTAGLKLKNEGEEACKKFVRENEIPKDECPNFQGGPAIANIIAKSREFTEWEIYQSSLAIQEVIFTLPKDKLPEPILKEEWRAQWLSEHGLDTVPYKEAAGLNLIIKNAVNTYKGVQVKVDNKNKNNLAKINRKNEIAKLNGEQEISFEEIKAFDDKGYLLQKPSPNKSIYCYQSVSPKPFITSKYHNVNLPEEYIGYYRKSNEPIVSPYQFDRLRIPIGEPGYVPKWQYTFLSKKENKRRKLSKRIKNVSPILGIICIKKDWCVFDMRGLLRTNHWKKYHKPTDSINDLFDYFTGDPVIDTKANVVRFRYKMENGIVNYKPVREKKGKELLENICDQNGSCKLATVDVGQNNPVAIGLFELKKVNGELTKTLISRHPTPIDFCNKITAYRERYDKLESSIKLDAIKQLTSEQKIEVDNYNNNFTPQNTKQIVCSKLNINPNDLPWDKMISGTHFISEKAQVSNKSEIYFTSTDKGKTKDVMKSDYKWFQDYKPKLSKEVRDALSDIEWRLRRESLEFNKLSKSREQDARQLANWISSMCDVIGIENLVKKNNFFGGSGKREPGWDNFYKPKKENRWWINAIHKALTELSQNKGKRVILLPAMRTSITCPKCKYCDSKNRNGEKFNCLKCGIELNADIDVATENLATVAITAQSMPKPTCERSGDAKKPVRARKAKAPEFHDKLAPSYTVVLREAV

SEQ ID NO: 13 - protein, 781 aa, unidentified
  REGION 1..781: note = Description of Unknown:CasPhi sequence
MRQPAEKTAFQVFRQEVIGTQKLSGGDAKTAGRLYKQGKMEAAREWLLKGARDDVPPNFQPPAKCLVVAVSHPFEEWDISKTNHDVQAYIYAQPLQAEGHLNGLSEKWEDTSADQHKLWFEKTGVPDRGLPVQAINKIAKAAVNRAFGVVRKVENRNEKRRSRDNRIAEHNRENGLTEVVREAPEVATNADGFLLHPPGIDPSILSYASVSPVPYNSSKHSFVRLPEEYQAYNVEPDAPIPQFVVEDRFAIPPGQPGYVPEWQRLKCSTNKHRRMRQWSNQDYKPKAGRRAKPLEFQAHLTRERAKGALLVVMRIKEDWVVFDVRGLLRNVEWRKVLSEEAREKLTLKGLLDLFTGDPVIDTKRGIVTFLYKAEITKILSKRTVKTKNARDLLLRLTEPGEDGLRREVGLVAVDLGQTHPIAAAIYRIGRTSAGALESTVLHRQGLREDQKEKLKEYRKRHTALDSRLRKEAFETLSVEQQKEIVTVSGSGAQITKDKVCNYLGVDPSTLPWEKMGSYTHFISDDFLRRGGDPNIVHFDRQPKKGKVSKKSQRIKRSDSQWVGRMRPRLSQETAKARMEADWAAQNENEEYKRLARSKQELARWCVNTLLQNTRCITQCDEIVVVIEDLNVKSLHGKGAREPGWDNFFTPKTENRWFIQILHKTFSELPKHRGEHVIEGCPLRTSITCPACSYCDKNSRNGEKFVCVACGATFHADFEVATYNLVRLATTGMPMPKSLERQGGGEKAGGARKARKKAKQVEKIVVQANANVTMNGASLHSP

SEQ ID NO: 14 - protein, 793 aa, unidentified; identical to SEQ ID NO: 7
  REGION 1..793: note = Description of Unknown:CasPhi sequence

SEQ ID NO: 15 - protein, 717 aa, unidentified; identical to SEQ ID NO: 12
  REGION 1..717: note = Description of Unknown:CasPhi sequence

SEQ ID NO: 16 - protein, 761 aa, unidentified; identical to SEQ ID NO: 11
  REGION 1..761: note = Description of Unknown:CasPhi sequence

SEQ ID NO: 17 - protein, 765 aa, unidentified
  REGION 1..765: note = Description of Unknown:CasPhi sequence
MYSLEMADLKSEPSLLAKLLRDRFPGKYWLPKYWKLAEKKRLTGGEEAACEYMADKQLDSPPPNFRPPARCVILAKSRPFEDWPVHRVASKAQSFVIGLSEQGFAALRAAPPSTADARRDWLRSHGASEDDLMALEAQLLETIMGNAISLHGGVLKKIDNANVKAAKRLSGRNEARLNKGLQELPPEQEGSAYGADGLLVNPPGLNLNIYCRKSCCPKPVKNTARFVGHYPGYLRDSDSILISGTMDRLTIIEGMPGHIPAWQREQGLVKPGGRRRRLSGSESNMRQKVDPSTGPRRSTRSGTVNRSNQRTGRNGDPLLVEIRMKEDWVLLDARGLLRNLRWRESKRGLSCDHEDLSLSGLLALFSGDPVIDPVRNEVVFLYGEGIIPVRSTKPVGTRQSKKLLERQASMGPLTLISCDLGQTNLIAGRASAISLTHGSLGVRSSVRIELDPEIIKSFERLRKDADRLETEILTAAKETLSDEQRGEVNSHEKDSPQTAKASLCRELGLHPPSLPWGQMGPSTTFIADMLISHGRDDDAFLSHGEFPTLEKRKKFDKRFCLESRPLLSSETRKALNESLWEVKRTSSEYARLSQRKKEMARRAVNFVVEISRRKTGLSNVIVNIEDLNVRIFHGGGKQAPGWDGFFRPKSENRWFIQAIHKAFSDLAAHHGIPVIESDPQRTSMTCPECGHCDSKNRNGVRFLCKGCGASMDADFDAACRNLERVALTGKPMPKPSTSCERLLSATTGKVCSDHSLSHDAIEKAS

SEQ ID NO: 18 - protein, 766 aa, unidentified
  REGION 1..766: note = Description of Unknown:CasPhi sequence
MEKEITELTKIRREFPNKKFSSTDMKKAGKLLKAEGPDAVRDFLNSCQEIIGDFKPPVKTNIVSISRPFEEWPVSMVGRAIQEYYFSLTKEELESVHPGTSSEDHKSFFNITGLSNYNYTSVQGLNLIFKNAKAIYDGTLVKANNKNKKLEKKFNEINHKRSLEGLPIITPDFEEPFDENGHLNNPPGINRNIYGYQGCAAKVFVPSKHKMVSLPKEYEGYNRDPNLSLAGFRNRLEIPEGEPGHVPWFQRMDIPEGQIGHVNKIQRFNFVHGKNSGKVKFSDKTGRVKRYHHSKYKDATKPYKFLEESKKVSALDSILAIITIGDDWVVFDIRGLYRNVFYRELAQKGLTAVQLLDLFTGDPVIDPKKGVVTFSYKEGVVPVFSQKIVPRFKSRDTLEKLTSQGPVALLSVDLGQNEPVAARVCSLKNINDKITLDNSCRISFLDDYKKQIKDYRDSLDELEIKIRLEAINSLETNQQVEIRDLDVFSADRAKANTVDMFDIDPNLISWDSMSDARVSTQISDLYLKNGGDESRVYFEINNKRIKRSDYNISQLVRPKLSDSTRKNLNDSIWKLKRTSEEYLKLSKRKLELSRAVVNYTIRQSKLLSGINDIVIILEDLDVKKKFNGRGIRDIGWDNFFSSRKENRWFIPAFHKTFSELSSNRGLCVIEVNPAWTSATCPDCGFCSKENRDGINFTCRKCGVSYHADIDVATLNIARVAVLGKPMSGPADRERLGDTKKPRVARSRKTMKRKDISNSTVEAMVTA

SEQ ID NO: 19 - protein, 870 aa, unidentified
  REGION 1..870: note = Description of Unknown:CasPhi sequence
MLVRTSTLVQDNKNSRSASRAFLKKPKMPKNKHIKEPTELAKLIRELFPGQRFTRAINTQAGKILKHKGRDEVVEFLKNKGIDKEQFMDFRPPTKARIVATSGAIEEFSYLRVSMAIQECCFGKYKFPKEKVNGKLVLETVGLTKEELDDFLPKKYYENKKSRDRFFLKTGICDYGYTYAQGLNEIFRNTRAIYEGVFTKVNNRNEKRREKKDKYNEERRSKGLSEEPYDEDESATDESGHLINPPGVNLNIWTCEGFCKGPYVTKLSGTPGYEVILPKVFDGYNRDPNEIISCGITDRFAIPEGEPGHIPWHQRLEIPEGQPGYVPGHQRFADTGQNNSGKANPNKKGRMRKYYGHGTKYTQPGEYQEVFRKGHREGNKRRYWEEDFRSEAHDCILYVIHIGDDWVVCDLRGPLRDAYRRGLVPKEGITTQELCNLFSGDPVIDPKHGVVTFCYKNGLVRAQKTISAGKKSRELLGALTSQGPIALIGVDLGQTEPVGARAFIVNQARGSLSLPTLKGSFLLTAENSSSWNVFKGEIKAYREAIDDLAIRLKKEAVATLSVEQQTEIESYEAFSAEDAKQLACEKFGVDSSFILWEDMTPYHTGPATYYFAKQFLKKNGGNKSLIEYIPYQKKKSKKTPKAVLRSDYNIACCVRPKLLPETRKALNEAIRIVQKNSDEYQRLSKRKLEFCRRVVNYLVRKAKKLTGLERVIIAIEDLKSLEKFFTGSGKRDNGWSNFFRPKKENRWFIPAFHKAFSELAPNRGFYVIECNPARTSITDPDCGYCDGDNRDGIKFECKKCGAKHHTDLDVAPLNIAIVAVTGRPMPKTVSNKSKRERSGGEKSVGASRKRNHRKSKANQEMLDATSSAAE

SEQ ID NO: 20 - protein, 830 aa, unidentified
  REGION 1..830: note = Description of Unknown:CasPhi sequence
MPKIKKPTEISLLRKEVFPDLHFAKDRMRAASLVLKNEGREAAIEYLRVNHEDKPPNFMPPAKTPYVALSRPLEQWPIAQASIAIQKYIFGLTKDEFSATKKLLYGDKSTPNTESRKRWFEVTGVPNFGYMSAQGLNAIFSGALARYEGVVQKVENRNKKRFEKLSEKNQLLIEEGQPVKDYVPDTAYHTPETLQKLAENNHVRVEDLGDMIDRLVHPPGIHRSIYGYQQVPPFAYDPDNPKGIILPKAYAGYTRKPHDIIEAMPNRLNIPEGQAGYIPEHQRDKLKKGGRVKRLRTTRVRVDATETVRAKAEALNAEKARLRGKEAILAVFQIEEDWALIDMRGLLRNVYMRKLIAAGELTPTTLLGYFTETLTLDPRRTEATFCYHLRSEGALHAEYVRHGKNTRELLLDLTKDNEKIALVTIDLGQRNPLAAAIFRVGRDASGDLTENSLEPVSRMLLPQAYLDQIKAYRDAYDSFRQNIWDTALASLTPEQQRQILAYEAYTPDDSKENVLRLLLGGNVMPDDLPWEDMTKNTHYISDRYLADGGDPSKVWFVPGPRKRKKNAPPLKKPPKPRELVKRSDHNISHLSEFRPQLLKETRDAFEKAKIDTERGHVGYQKLSTRKDQLCKEILNWLEAEAVRLTRCKTMVLGLEDLNGPFFNQGKGKVRGWVSFFRQKQENRWIVNGFRKNALARAHDKGKYILELWPSWTSQTCPKCKHVHADNRHGDDFVCLQCGARLHADAEVATWNLAVVAIQGHSLPGPVREKSNDRKKSGSARKSKKANESGKVVGAWAAQATPKRATSKKETGTARNPVYNPLETQASCPAP

SEQ ID NO: 21 - protein, 790 aa, unidentified
  REGION 1..790: note = Description of Unknown:CasPhi sequence
MTPSPQIARLVETPLAAALKAHHPGKKFRSDYLKKAGKILKDQGVEAAMAHLDGKDQAEPPNFKPPAKCRIVARSREFSEWPIVKASVEIQKYIYGLTLEERKACDPGKSSASHKAWFAKTGVNTFGYSSVQGFNLIFGHTLGRYDGVLVKTENLNKKRAEKNERFRAKALAEGRAEPVCPPLVTATNDTGQDVTLEDGRVVRPGQLLQPPGINPNIYAYQQVSPKAYVPGIIELPEEFQGYSRDPNAVILPLVPRDRLSIPKGQPGYVPEPHREGLTGRKDRRMRRYYETERGTKLKRPPLTAKGRADKANEALLVVVRIDSDWVVMDVRGLLRNARWRRLVSKEGITLNGLLDLFTGDPVLNPKDCSVSRDTGDPVNDPRHGVVTFCYKLGVVDVCSKDRPIKGFRTKEVLERLTSSGTVGMVSIDLGQTNPVAAAVSRVTKGLQAETLETFTLPDDLLGKVRAYRAKTDRMEEGFRRNALRKLTAEQQAEITRYNDATEQQAKALVCSTYGIGPEEVPWERMTSNTTYISDHILDHGGDPDTVFFMATKRGQNKPTLHKRKDKAWGQKFRPAISVETRLARQAAEWELRRASLEFQKLSVWKTELCRQAVNYVMERTKKRTQCDVIIPVIEDLPVPLFHGSGKRDPGWANFFVHKRENRWFIDGLHKAFSELGKHRGIYVFEVCPQRTSITCPKCGHCDPDNRDGEKFVCLSCQATLNADLDVATTNLVRVALTGKVMPRSERSGDAQTPGPARKARTGKIKGSKPTSAPQGATQTDAKAHLSQTGV

SEQ ID NO: 22 - protein, 790 aa, unidentified
  REGION 1..790: note = Description of Unknown:CasPhi sequence
MTPSPQIARLVETPLAAALKAHHPGKKFRSDYLKKAGKILKDQGVEAAMAHLDGKDQAEPPNFKPPAKCRIVARSREFSEWPIVKASVEIQKYIYGLTLEERKACDPGKSSASHKAWFAKTGVNTFGYSSVQGFNLIFGHTLGRYDGVLVKTENLNKKRAEKNERFRAKALAEGRAEPVCPPLVTATNDTGQDVTLEDGRVVRPGQLLQPPGINPNIYAYQQVSPKAYVPGIIELPEEFQGYSRDPNAVILPLVPRDRLSIPKGQPGYVPEPHREGLTGRKDRRMRRYYETERGTKLKRPPLTAKGRADKANEALLVVVRIDSDWVVMDVRGLLRNARWRRLVSKEGITLNGLLDLFTGDPVLNPKDCSVSRDTGDPVNDPRHGVVTFCYKLGVVDVCSKDRPIKGFRTKEVLERLTSSGTVGMVSIDLGQTNPVAAAVSRVTKGLQAETLETFTLPDDLLGKVRAYRAKTDRMEEGFRRNALRKLTAEQQAEITRYNDATEQQAKALVCSTYGIGPEEVPWERMTSNTTYISDHILDHGGDPDTVFFMATKRGQNKPTLHKRKDKAWGQKFRPAISVETRLARQAAEWELRRASLEFQKLSVWKTELCRQAVNYVMERTKKRTQCDVIIPVIEDLPVPLFHGSGKRDPGWANFFVHKRENRWFIDGLHKAFSELGKHRGIYVFEVCPQRTSITCPKCGHCDPDNRDGEKFVCLSCQATLHADLDVATTNLVRVALTGKVMPRSERSGDAQTPGPARKARTGKIKGSKPTSAPQGATQTDAKAHLSQTGV

SEQ ID NO: 23 - protein, 782 aa, unidentified
  REGION 1..782: note = Description of Unknown:CasPhi sequence
MKTEKPKTALTLLREEVFPGKKYRLDVLKEAGKKLSTKGREATIEFLTGKDEERPQNFQPPAKTSIVAQSRPFDQWPIVQVSLAVQKYIYGLTQSEFEANKKALYGETGKAISTESRRAWFEATGVDNFGFTAAQGINPIFSQAVARYEGVIKKVENRNEKKLKKLTKKNLLRLESGEEIEDFEPEATFNEEGRLLQPPGANPNIYCYQQISPRIYDPSDPKGVILPQIYAGYDRKPEDIISAGVPNRLAIPEGQPGYIPEHQRAGLKTQGRIRCRASVEAKARAAILAVVHLGEDWVVLDLRGLLRNVYWRKLASPGTLTLKGLLDFFTGGPVLDARRGIATFSYTLKSAAAVHAENTYKGKGTREVLLKLTENNSVALVTVDLGQRNPLAAMIARVSRTSQGDLTYPESVEPLTRLFLPDPFLEEVRKYRSSYDALRLSIREAAIASLTPEQQAEIRYIEKFSAGDAKKNVAEVFGIDPTQLPWDAMTPRTTYISDLFLRMGGDRSRVFFEVPPKKAKKAPKKPPKKPAGPRIVKRTDGMIARLREIRPRLSAETNKAFQEARWEGERSNVAFQKLSVRRKQFARTVVNHLVQTAQKMSRCDTVVLGIEDLNVPFFHGRGKYQPGWEGFFRQKKENRWLINDMHKALSERGPHRGGYVLELTPFWTSLRCPKCGHTDSANRDGDDFVCVKCGAKLHSDLEVATANLALVAITGQSIPRPPREQSSGKKSTGTARMKKTSGETQGKGSKACVSEALNKIEQGTARDPVYNPLNSQVSCPAP

SEQ ID NO: 24 - protein, 774 aa, unidentified
  REGION 1..774: note = Description of Unknown:CasPhi sequence
VYNPDMKKPNNIRRIREEHFEGLCFGKDVLTKAGKIYEKDGEEAAIDFLMGKDEEDPPNFKPPAKTTIVAQSRPFDQWPIYQVSQAVQERVFAYTEEEFNASKEALFSGDISSKSRDFWFKTNNISDQGIGAQGLNTILSHAFSRYSGVIKKVENRNKKRLKKLSKKNQLKIEEGLEILEFKPDSAFNENGLLAQPPGINPNIYGYQAVTPFVFDPDNPGDVILPKQYEGYSRKPDDIIEKGPSRLDIPKGQPGYVPEHQRKNLKKKGRVRLYRRTPPKTKALASILAVLQIGKDWVLFDMRGLLRSVYMREAATPGQISAKDLLDTFTGCPVLNTRTGEFTFCYKLRSEGALHARKIYTKGETRTLLTSLTSENNTIALVTVDLGQRNPAAIMISRLSRKEELSEKDIQPVSRRLLPDRYLNELKRYRDAYDAFRQEVRDEAFTSLCPEHQEQVQQYEALTPEKAKNLVLKHFFGTHDPDLPWDDMTSNTHYIANLYLERGGDPSKVFFTRPLKKDSKSKKPRKPTKRTDASISRLPEIRPKMPEDARKAFEKAKWEIYTGHEKFPKLAKRVNQLCREIANWIEKEAKRLTLCDTVVVGIEDLSLPPKRGKGKFQETWQGFFRQKFENRWVIDTLKKAIQNRAHDKGKYVLGLAPYWTSQRCPACGFIHKSNRNGDHFKCLKCEALFHADSEVATWNLALVAVLGKGITNPDSKKPSGQKKTGTTRKKQIKGKNKGKETVNVPPTTQEVEDIIAFFEKDDETVRNPVYKPTGT

SEQ ID NO: 25 - protein, 769 aa, unidentified
  REGION 1..769: note = Description of Unknown:CasPhi sequence
MKKPNNIRRIREEHFEGLCFGKDVLTKAGKIYEKDGEEAAIDFLMGKDEEDPPNFKPPAKTTIVAQSRPFDQWPIYQVSQAVQERVFAYTEEEFNASKEALFSGDISSKSRDFWFKTNNISDQGIGAQGLNTILSHAFSRYSGVIKKVENRNKKRLKKLSKKNQLKIEEGLEILEFKPDSAFNENGLLAQPPGINPNIYGYQAVTPFVFDPDNPGDVILPKQYEGYSRKPDDIIEKGPSRLDIPKGQPGYVPEHQRKNLKKKGRVRLYRRTPPKTKALASILAVLQIGKDWVLFDMRGLLRSVYMREAATPGQISAKDLLDTFTGCPVLNTRTGEFTFCYKLRSEGALHARKIYTKGETRTLLTSLTSENNTIALVTVDLGQRNPAAIMISRLSRKEELSEKDIQPVSRRLLPDRYLNELKRYRDAYDAFRQEVRDEAFTSLCPEHQEQVQQYEALTPEKAKNLVLKHFFGTHDPDLPWDDMTSNTHYIANLYLERGGDPSKVFFTRPLKKDSKSKKPRKPTKRTDASISRLPEIRPKMPEDARKAFEKAKWEIYTGHEKFPKLAKRVNQLCREIANWIEKEAKRLTLCDTVVVGIEDLSLPPKRGKGKFQETWQGFFRQKFENRWVIDTLKKAIQNRAHDKGKYVLGLAPYWTSQRCPACGFIHKSNRNGDHFKCLKCEALFHADSEVATWNLALVAVLGKGITNPDSKKPSGQKKTGTTRKKQIKGKNKGKETVNVPPTTQEVEDIIAFFEKDDETVRNPVYKPTGT

SEQ ID NO: 26 - protein, 767 aa, unidentified
  REGION 1..767: note = Description of Unknown:CasPhi sequence
VIKTHFPAGRFRKDHQKTAGKKLKHEGEEACVEYLRNKVSDYPPNFKPPAKGTIVAQSRPFSEWPIVRASEAIQKYVYGLTVAELDVFSPGTSKPSHAEWFAKTGVENYGYRQVQGLNTIFQNTVNRFKGVLKKVENRNKKSLKRQEGANRRRVEEGLPEVPVTVESATDDEGRLLQPPGVNPSIYGYQGVAPRVCTDLQGFSGMSVDFAGYRRDPDAVLVESLPEGRLSIPKGERGYVPEWQRDPERNKFPLREGSRRQRKWYSNACHKPKPGRTSKYDPEALKKASAKDALLVSISIGEDWAIIDVRGLLRDARRRGFTPEEGLSLNSLLGLFTEYPVFDVQRGLITFTYKLGQVDVHSRKTVPTFRSRALLESLVAKEEIALVSVDLGQTNPASMKVSRVRAQEGALVAEPVHRMFLSDVLLGELSSYRKRMDAFEDAIRAQAFETMTPEQQAEITRVCDVSVEVARRRVCEKYSISPQDVPWGEMTGHSTFIVDAVLRKGGDESLVYFKNKEGETLKFRDLRISRMEGVRPRLTKDTRDALNKAVLDLKRAHPTFAKLAKQKLELARRCVNFIEREAKRYTQCERVVFVIEDLNVGFFHGKGKRDRGWDAFFTAKKENRWVIQALHKAFSDLGLHRGSYVIEVTPQRTSMTCPRCGHCDKGNRNGEKFVCLQCGATLHADLEVATDNIERVALTGKAMPKPPVRERSGDVQKAGTARKARKPLKPKQKTEPSVQEGSSDDGVDKSPGDASRNPVYNPSDTLSI

SEQ ID NO: 27 - protein, 763 aa, unidentified
  REGION 1..763: note = Description of Unknown:CasPhi sequence
MAKAKTLAALLRELLPGQHLAPHHRWVANKLLMTSGDAAAFVIGKSVSDPVRGSFRKDVITKAGRIFKKDGPDAAAAFLDGKWEDRPPNFQPPAKAAIVAISRSFDEWPIVKVSCAIQQYLYALPVQEFESSVPEARAQAHAAWFQDTGVDDCNFKSTQGLNAIFNHGKRTYEGVLKKAQNRNDKKNLRLERINAKRAEAGQAPLVAGPDESPTDDAGCLLHPPGINANIYCYQQVSPRPYEQSCGIQLPPEYAGYNRLSNVAIPPMPNRLDIPQGQPGYVPEHHRHGIKKFGRVRKRYGVVPGRNRDADGKRTRQVLTEAGAAAKARDSVLAVIRIGDDWTVVDLRGLLRNAQWRKLVPDGGITVQGLLDLFTGDPVIDPRRGVVTFIYKADSVGIHSEKVCRGKQSKNLLERLCAMPEKSSTRLDCARQAVALVSVDLGQRNPVAARFSRVSLAEGQLQAQLVSAQFLDDAMVAMIRSYREEYDRFESLVREQAKAALSPEQLSEIVRHEADSAESVKSCVCAKFGIDPAGLSWDKMTSGTWRIADHVQAAGGDVEWFFFKTCGKGKEIKTVRRSDFNVAKQFRLRLSPETRKDWNDAIWELKRGNPAYVSFSKRKSEFARRVVNDLVHRARRAVRCDEVVFAIEDLNISFFHGKGQRQMGWDAFFEVKQENRWFIQALHKAFVERATHKGGYVLEVAPARTSTTCPECRHCDPESRRGEQFCCIKCRHTCHADLEVATFNIEQVALTGVSLPKRLSSTLL

SEQ ID NO: 28 - protein, 761 aa, unidentified
  REGION 1..761: note = Description of Unknown:CasPhi sequence
MSKEKTPPSAYAILKAKHFPDLDFEKKHKMMAGRMFKNGASEQEVVQYLQGKGSESLMDVKPPAKSPILAQSRPFDEWEMVRTSRLIQETIFGIPKRGSIPKRDGLSETQFNELVASLEVGGKPMLNKQTRAIFYGLLGIKPPTFHAMAQNILIDLAINIRKGVLKKVDNLNEKNRKKVKRIRDAGEQDVMVPAEVTAHDDRGYLNHPPGVNPTIPGYQGVVIPFPEGFEGLPSGMTPVDWSHVLVDYLPHDRLSIPKGSPGYIPEWQRPLLNRHKGRRHRSWYANSLNKPRKSRTEEAKDRQNAGKRTALIEAERLKGVLPVLMRFKEDWLIIDARGLLRNARYRGVLPEGSTLGNLIDLFSDSPRVDTRRGICTFLYRKGRAYSTKPVKRKESKETLLKLTEKSTIALVSIDLGQTNPLTAKLSKVRQVDGCLVAEPVLRKLIDNASEDGKEIARYRVAHDLLRARILEDAIDLLGIYKDEVVRARSDTPDLCKERVCRFLGLDSQAIDWDRMTPYTDFIAQAFVAKGGDPKVVTIKPNGKPKMFRKDRSIKNMKGIRLDISKEASSAYREAQWAIQRESPDFQRLAVWQSQLTKRIVNQLVAWAKKCTQCDTVVLAFEDLNIGMMHGSGKWANGGWNALFLHKQENRWFMQAFHKALTELSAHKGIPTIEVLPHRTSITCTQCGHCHPGNRDGERFKCLKCEFLANTDLEIATDNIERVALTGLPMPKGERSSAKRKPGGTRKTKKSKHSGNSPLAAE

SEQ ID NO: 29 - protein, 746 aa, unidentified
  REGION 1..746: note = Description of Unknown:CasPhi sequence
MEKAGPTSPLSVLIHKNFEGCRFQIDHLKIAGRKLAREGEAAAIEYLLDKKCEGLPPNFQPPAKGNVIAQSRPFTEWAPYRASVAIQKYIYSLSVDERKVCDPGSSSDSHEKWFKQTGVQNYGYTHVQGLNLIFKHALARYDGVLKKVDNRNEKNRKKAERVNSFRREEGLPEEVFEEEKATDETGHLLQPPGVNHSIYCYQSVRPKPFNPRKPGGISLPEAYSGYSLKPQDELPIGSLDRLSIPPGQPGYVPEWQRSQLTTQKHRRKRSWYSAQKWKPRTGRTSTFDPDRLNCARAQGAILAVVRIHEDWVVFDVRGLLRNALWRELAGKGLTVRDLLDFFTGDPVVDTKRGVVTFTYKLGKVDVHSLRTVRGKRSKKVLEDLTLSSDVGLVTIDLGQTNVLAADYSKVTRSENGELLAVPLSKSFLPKHLLHEVTAYRTSYDQMEEGFRRKALLTLTEDQQVEVTLVRDFSVESSKTKLLQLGVDVTSLPWEKMSSNTTYISDQLLQQGADPASLFFDGERDGKPCRHKKKDRTWAYLVRPKVSPETRKALNEALWALKNTSPEFESLSKRKIQFSRRCMNYLLNEAKRISGCGQVVFVIEDLNVRVHHGRGKRAIGWDNFFKPKRENRWFMQALHKAASELAIHRGMHIIEACPARSSITCPKCGHCDPENRCSSDREKFLCVKCGAAFHADLEVATFNLRKVALTGTALPKSIDHSRDGLIPKGARNRKLKEPQANDEKACA

SEQ ID NO: 30 - protein, 735 aa, unidentified
  REGION 1..735: note = Description of Unknown:CasPhi sequence
MKEQSPLSSVLKSNFPGKKFLSADIRVAGRKLAQLGEAAAVEYLSPRQRDSVPNFRPPAFCTVVAKSRPFEEWPIYKASVLLQEQIYGMTGQEFEERCGSIPTSLSGLRQWASSVGLGAAMEGLHVQGMNLMVKNAINRYKGVLVKVENRNKKLVEANEAKNSSREERGLPPLRPPELGSAFGPDGRLVNPPGIDKSIRLYQGVSPVPVVKTTGRPTVHRLDIPAGEKGHVPLWQREAGLVKEGPRRRRMWYSNSNLKRSRKDRSAEASEARKADSVVVRVSVKEDWVDIDVRGLLRNVAWRGIERAGESTEDLLSLFSGDPVVDPSRDSVVFLYKEGVVDVLSKKVVGAGKSRKQLEKMVSEGPVALVSCDLGQTNYVAARVSVLDESLSPVRSFRVDPREFPSADGSQGVVGSLDRIRADSDRLEAKLLSEAEASLPEPVRAEIEFLRSERPSAVAGRLCLKLGIDPRSIPWEKMGSTTSFISEALSAKGSPLALHDGAPIKDSRFAHAARGRLSPESRKALNEALWERKSSSREYGVISRRKSEASRRMANAVLSESRRLTGLAVVAVNLEDLNMVSKFFHGRGKRAPGWAGFFTPKMENRWFIRSIHKAMCDLSKHRGITVIESRPERTSISCPECGHCDPENRSGERFSCKSCGVSLHADFEVATRNLERVALTGKPMPRRENLHSPEGATASRKTRKKPREATASTFLDLRSVLSSAENEGSGPAARAG

SEQ ID NO: 31 - protein, 725 aa, unidentified
  REGION 1..725: note = Description of Unknown:CasPhi sequence
MLPPSNKIGKSMSLKEFINKRNFKSSIIKQAGKILKKEGEEAVKKYLDDNYVEGYKKRDFPITAKCNIVASNRKIEDFDISKFSSFIQNYVFNLNKDNFEEFSKIKYNRKSFDELYKKIANEIGLEKPNYENIQGEIAVIRNAINIYNGVLKKVENRNKKIQEKNQSKDPPKLLSAFDDNGFLAERPGINETIYGYQSVRLRHLDVEKDKDIIVQLPDIYQKYNKKSTDKISVKKRLNKYNVDEYGKLISKRRKERINKDDAILCVSNFGDDWIIFDARGLLRQTYRYKLKKKGLCIKDLLNLFTGDPIINPTKTDLKEALSLSFKDGIINNRTLKVKNYKKCPELISELIRDKGKVAMISIDLGQTNPISYRLSKFTANNVAYIENGVISEDDIVKMKKWREKSDKLENLIKEEAIASLSDDEQREVRLYENDIADNTKKKILEKFNIREEDLDFSKMSNNTYFIRDCLKNKNIDESEFTFEKNGKKLDPTDACFAREYKNKLSELTRKKINEKIWEIKKNSKEYHKISIYKKETIRYIVNKLIKQSKEKSECDDIIVNIEKLQIGGNFFGGRGKRDPGWNNFFLPKEENRWFINACHKAFSELAPHKGIIVIESDPAYTSQTCPKCENCDKENRNGEKFKCKKCNYEANADIDVATENLEKIAKNGRRLIKNFDQLGERLPGAEMPGGARKRKPSKSLPKNGRGAGVGSEPELINQSPSQVIA

SEQ ID NO: 32 - protein, 718 aa, unidentified
  REGION 1..718: note = Description of Unknown:CasPhi sequence
VPDKKETPLVALCKKSFPGLRFKKHDSRQAGRILKSKGEGAAVAFLEGKGGTTQPNFKPPVKCNIVAMSRPLEEWPIYKASVVIQKYVYAQSYEEFKATDPGKSEAGLRAWLKATRVDTDGYFNVQGLNLIFQNARATYEGVLKKVENRNSKKVAKIEQRNEHRAERGLPLLTLDEPETALDETGHLRHRPGINCSVFGYQHMKLKPYVPGSIPGVTGYSRDPSTPIAACGVDRLEIPEGQPGYVPPWDRENLSVKKHRRKRASWARSRGGAIDDNMLLAVVRVADDWALLDLRGLLRNTQYRKLLDRSVPVTIESLLNLVTNDPTLSVVKKPGKPVRYTATLIYKQGVVPVVKAKVVKGSYVSKMLDDTTETFSLVGVDLGVNNLIAANALRIRPGKCVERLQAFTLPEQTVEDFFRFRKAYDKHQENLRLAAVRSLTAEQQAEVLALDTFGPEQAKMQVCGHLGLSVDEVPWDKVNSRSSILSDLAKERGVDDTLYMFPFFKGKGKKRKTEIRKRWDVNWAQHFRPQLTSETRKALNEAKWEAERNSSKYHQLSIRKKELSRHCVNYVIRTAEKRAQCGKVIVAVEDLHHSFRRGGKGSRKSGWGGFFAAKQEGRWLMDALFGAFCDLAVHRGYRVIKVDPYNTSRTCPECGHCDKANRDRVNREAFICVCCGYRGNADIDVAAYNIAMVAITGVSLRKAARASVASTPLESLAAE

SEQ ID NO: 33 - protein, 708 aa, unidentified
  REGION 1..708: note = Description of Unknown:CasPhi sequence
MSKTKELNDYQEALARRLPGVRHQKSVRRAARLVYDRQGEDAMVAFLDGKEVDEPYTLQPPAKCHILAVSRPIEEWPIARVTMAVQEHVYALPVHEVEKSRPETTEGSRSAWFKNSGVSNHGVTHAQTLNAILKNAYNVYNGVIKKVENRNAKKRDSLAAKNKSRERKGLPHFKADPPELATDEQGYLLQPPSPNSSVYLVQQHLRTPQIDLPSGYTGPVVDPRSPIPSLIPIDRLAIPPGQPGYVPLHDREKLTSNKHRRMKLPKSLRAQGALPVCFRVFDDWAVVDGRGLLRHAQYRRLAPKNVSIAELLELYTGDPVIDIKRNLMTFRFAEAVVEVTARKIVEKYHNKYLLKLTEPKGKPVREIGLVSIDLNVQRLIALAIYRVHQTGESQLALSPCLHREILPAKGLGDFDKYKSKFNQLTEEILTAAVQTLTSAQQEEYQRYVEESSHEAKADLCLKYSITPHELAWDKMTSSTQYISRWLRDHGWNASDFTQITKGRKKVERLWSDSRWAQELKPKLSNETRRKLEDAKHDLQRANPEWQRLAKRKQEYSRHLANTVLSMAREYTACETVVIAIENLPMKGGFVDGNGSRESGWDNFFTHKKENRWMIKDIHKALSDLAPNRGVHVLEVNPQYTSQTCPECGHRDKANRDPIQRERFCCTHCGAQRHADLEVATHNIAMVATTGKSLTGKSLAPQRLQEAAE

SEQ ID NO: 34 - protein, 491 aa, unidentified
  REGION 1..491: note = Description of Unknown:CasPhi sequence
VLLSDRIQYTDPSAPIPAMTVVDRRKIKKGEPGYVPPFMRKNLSTNKHRRMRLSRGQKEACALPVGLRLPDGKDGWDFIIFDGRALLRACRRLRLEVTSMDDVLDKFTGDPRIQLSPAGETIVTCMLKPQHTGVIQQKLITGKMKDRLVQLTAEAPIAMLTVDLGEHNLVACGAYTVGQRRGKLQSERLEAFLLPEKVLADFEGYRRDSDEHSETLRHEALKALSKRQQREVLDMLRTGADQARESLCYKYGLDLQALPWDKMSSNSTFIAQHLMSLGFGESATHVRYRPKRKASERTILKYDSRFAAEEKIKLTDETRRAWNEAIWECQRASQEFRCLSVRKLQLARAAVNWTLTQAKQRSRCPRVVVVVEDLNVRFMHGGGKRQEGWAGFFKARSEKRWFIQALHKAYTELPTNRGIHVMEVNPARTSITCTKCGYCDPENRYGEDFHCRNPKCKVRGGHVANADLDIATENLARVALSGPMPKAPKLK

SEQ ID NO: 35 - protein, 848 aa, unidentified
  REGION 1..848: note = Description of Unknown:CasPhi sequence
MTPSFGYQMIIVTPIHHASGAWATLRLLFLNPKTSGVMLGMTKTKSAFALMREEVFPGLLFKSADLKMAGRKFAKEGREAAIEYLRGKDEERPANFKPPAKGDIIAQSRPFDQWPIVQVSQAIQKYIFGLTKAEFDATKTLLYGEGNHPTTESRRRWFEATGVPDFGFTSAQGLNAIFSSALARYEGVIQKVENRNEKRLKKLSEKNQRLVEEGHAVEAYVPETAFHTLESLKALSEKSLVPLDDLMDKIDRLAQPPGINPCLYGYQQVAPYIYDPENPRGVVLPDLYLGYCRKPDDPITACPNRLDIPKGQPGYIPEHQRGQLKKHGRVRRFRYTNPQAKARAKAQTAILAVLRIDEDWVVMDLRGLLRNVYFREVAAPGELTARTLLDTFTGCPVLNLRSNVVTFCYDIESKGALHAEYVRKGWATRNKLLDLTKDGQSVALLSVDLGQRHPVAVMISRLKRDDKGDLSEKSIQVVSRTFADQYVDKLKRYRVQYDALRKEIYDAALVSLPPEQQAEIRAYEAFAPGDAKANVLSVMFQGEVSPDELPWDKMNTNTHYISDLYLRRGGDPSRVFFVPQPSTPKKNAKKPPAPRKPVKRTDENVSHMPEFRPHLSNETREAFQKAKWTMERGNVRYAQLSRFLNQIVREANNWLVSEAKKLTQCQTVVWAIEDLHVPFFHGKGKYHETWDGFFRQKKEDRWFVNVFHKAISERAPNKGEYVMEVAPYRTSQRCPVCGFVDADNRHGDHFKCLRCGVELHADLEVATWNIALVAVQGHGIAGPPREQSCGGETAGTARKGKNIKKNKGLADAVTVEAQDSEGGSKKDAGTARNPVYIPSESQVNCPAP

SEQ ID NO: 36 - protein, 781 aa, unidentified
  REGION 1..781: note = Description of Unknown:CasPhi sequence
MKPKTPKPPKTPVAALIDKHFPGKRFRASYLKSVGKKLKNQGEDVAVRFLTGKDEERPPNFQPPAKSNIVAQSRPIEEWPIHKVSVAVQEYVYGLTVAEKEACSDAGESSSSHAAWFAKTGVENFGYTSVQGLNKIFPPTFNRFDGVIKKVENRNEKKRQKATRINEAKRNKGQSEDPPEAEVKATDDAGYLLQPPGINHSVYGYQSITLCPYTAEKFPTIKLPEEYAGYHSNPDAPIPAGVPDRLAIPEGQPGHVPEEHRAGLSTKKHRRVRQWYAMANWKPKPKRTSKPDYDRLAKARAQGALLIVIRIDEDWVVVDARGLLRNVRWRSLGKREITPNELLDLFTGDPVLDLKRGVVTFTYAEGVVNVCSRSTTKGKQTKVLLDAMTAPRDGKKRQIGMVAVDLGQTNPIAAEYSRVGKNAAGTLEATPLSRSTLPDELLREIALYRKAHDRLEAQLREEAVLKLTAEQQAENARYVETSEEGAKLALANLGVDTSTLPWDAMTGWSTCISDHLINHGGDTSAVFFQTIRKGTKKLETIKRKDSSWADIVRPRLTKETREALNDFLWELKRSHEGYEKLSKRLEELARRAVNHVVQEVKWLTQCQDIVIVIEDLNVRNFHGGGKRGGGWSNFFTVKKENRWFMQALHKAFSDLAAHRGIPVLEVYPARTSITCLGCGHCDPENRDGEAFVCQQCGATFHADLEVATRNIARVALTGEAMPKAPAREQPGGAKKRGTSRRRKLTEVAVKSAEPTIHQAKNQQLNGTSRDPVYKGSELPAL

SEQ ID NO: 37 - protein, 767 aa, unidentified
  REGION 1..767: note = Description of Unknown:CasPhi sequence
MSEITDLLKANFKGKTFKSADMRMAGRILKKSGAQAVIKYLSDKGAVDPPDFRPPAKCNIIAQSRPFDEWPICKASMAIQQHIYGLTKNEFDESSPGTSSASHEQWFAKTGVDTHGFTHVQGLNLIFQHAKKRYEGVIKKVENYNEKERKKFEGINERRSKEGMPLLEPRLRTAFGDDGKFAEKPGVNPSIYLYQQTSPRPYDKTKHPYVHAPFELKEITTIPTQDDRLKIPFGAPGHVPEKHRSQLSMAKHKRRRAWYALSQNKPRPPKDGSKGRRSVRDLADLKAASLADAIPLVSRVGFDWVVIDGRGLLRNLRWRKLAHEGMTVEEMLGFFSGDPVIDPRRNVATFIYKAEHATVKSRKPIGGAKRAREELLKATASSDGVIRQVGLISVDLGQTNPVAYEISRMHQANGELVAEHLEYGLLNDEQVNSIQRYRAAWDSMNESFRQKAIESLSMEAQDEIMQASTGAAKRTREAVLTMFGPNATLPWSRMSSNTTCISDALIEVGKEEETNFVTSNGPRKRTDAQWAAYLRPRVNPETRALLNQAVWDLMKRSDEYERLSKRKLEMARQCVNFVVARAEKLTQCNNIGIVLENLVVRNFHGSGRRESGWEGFFEPKRENRWFMQVLHKAFSDLAQHRGVMVFEVHPAYSSQTCPACRYVDPKNRSSEDRERFKCLKCGRSFNADREVATFNIREIARTGVGLPKPDCERSRGVQTTGTARNPGRSLKSNKNPSEPKRVLQSKTRKKITSTETQNEPLATDLKT

SEQ ID NO: 38 - protein, 760 aa, unidentified
  REGION 1..760: note = Description of Unknown:CasPhi sequence
MTPKTESPLSALCKKHFPGKRFRTNYLKDAGKILKKHGEDAVVAFLSDKQEDEPANFCPPAKVHILAQSRPFEDWPINLASKAIQTYVYGLTADERKTCEPGTSKESHDRWFKETGVDHHGFTSVQGLNLIFKHTLNRYDGVIKKVETRNEKRRSSVVRINEKKAAEGLPLIAAEAEETAFGEDGRLLQPPGVNHSIYCFQQVSPQPYSSKKHPQVVLPHAVQGVDPDAPIPVGRPNRLDIPKGQPGYVPEWQRPHLSMKCKRVRMWYARANWRRKPGRRSVLNEARLKEASAKGALPIVLVIGDDWLVMDARGLLRSVFWRRVAKPGLSLSELLNVTPTGLFSGDPVIDPKRGLVTFTSKLGVVAVHSRKPTRGKKSKDLLLKMTKPTDDGMPRHVGMVAIDLGQTNPVAAEYSRVVQSDAGTLKQEPVSRGVLPDDLLKDVARYRRAYDLTEESIRQEAIALLSEGHRAEVTKLDQTTANETKRLLVDRGVSESLPWEKMSSNTTYISDCLVALGKTDDVFFVPKAKKGKKETGIAVKRKDHGWSKLLRPRTSPEARKALNENQWAVKRASPEYERLSRRKLELGRRCVNHIIQETKRWTQCEDIVVVLEDLNVGFFHGSGKRPDGWDNFFVSKRENRWFIQVLHKAFGDLATHRGTHVIEVHPARTSITCIKCGHCDAGNRDGESFVCLASACGDRRHADLEVATRNVARVAITGERMPPSEQARDVQKAGGARKRKPSARNVKSSYPAVEPAPASP

SEQ ID NO: 39 - protein, 752 aa, unidentified
  REGION 1..752: note = Description of Unknown:CasPhi sequence
MSDNKMKKLSKEEKPLTPLQILIRKYIDKSQYPSGFKTTIIKQAGVRIKSVKSEQDEINLANWIISKYDPTYIKRDFNPSAKCQIIATSRSVADFDIVKMSNKVQEIFFASSHLDKNVFDIGKSKSDHDSWFERNNVDRGIYTYSNVQGMNLIFSNTKNTYLGVAVKAQNKFSSKMKRIQDINNFRITNHQSPLPIPDEIKIYDDAGFLLNPPGVNPNIFGYQSCLLKPLENKEIISKTSFPEYSRLPADMIEVNYKISNRLKFSNDQKGFIQFKDKLNLFKINSQELFSKRRRLSGQPILLVASFGDDWVVLDGRGLLRQVYYRGIAKPGSITISELLGFFTGDPIVDPIRGVVSLGFKPGVLSQETLKTTSARIFAEKLPNLVLNNNVGLMSIDLGQTNPVSYRLSEITSNMSVEHICSDFLSQDQISSIEKAKTSLDNLEEEIAIKAVDHLSDEDKINFANFSKLNLPEDTRQSLFEKYPELIGSKLDFGSMGSGTSYIADELIKFENKDAFYPSGKKKFDLSFSRDLRKKLSDETRKSYNDALFLEKRTNDKYLKNAKRRKQIVRTVANSLVSKIEELGLTPVINIENLAMSGGFFDGRGKREKGWDNFFKVKKENRWVMKDFHKAFSELSPHHGVIVIESPPYCTSVTCTKCNFCDKKNRNGHKFTCQRCGLDANADLDIATENLEKVAISGKRMPGSERSSDERKVAVARKAKSPKGKAIKGVKCTITDEPALLSANSQDCSQSTS

SEQ ID NO: 40 - protein, 747 aa, unidentified
  REGION 1..747: note = Description of Unknown:CasPhi sequence
MALSLAEVRERHFKGLRFRSSYLKRAGKILKKEGEAACVAYLTGKDEESPPNFKPPAKCDVVAQSRPFEEWPIVQASVAVQSYVYGLTKEAFEAFNPGTTKQSHEACLAATGIDTCGYSNVQGLNLIFRQAKNRYEGVITKVENRNKKAKKKLTRKNEWRQKNGHSELPEAPEELTFNDEGRLLQPPGINPSLYTYQQISPTPWSPKDSSILPPQYAGYERDPNAPIPFGVAKDRLTIASGCPGYIPEWMRTAGEKTNPRTQKKFMHPGLSTRKNKRMRLPRSVRSAPLGALLVTIHLGEDWLVLDVRGLLRNARWRGVAPKDISTQGLLNLFTGDPVIDTRRGVVTFTYKPETVGIHSRTWLYKGKQTKEVLEKLTQDQTVALVAIDLGQTNPVSAAASRVSRSGENLSIETVDRFFLPDELIKELRLYRMAHDRLEERIREESTLALTEAQQAEVRALEHVVRDDAKNKVCAAFNLDAASLPWDQMTSNTTYLSEAILAQGVSRDQVFFTPNPKKGSKEPVEVMRKDRAWVYAFKAKLSEETRKAKNEALWALKRASPDYARLSKRREELCRRSVNMVINRAKKRTQCQVVIPVLEDLNIGFFHGSGKRLPGWDNFFVAKKENRWLMNGLHKSFSDLAVHRGFYVFEVMPHRTSITCPACGHCDSENRDGEAFVCLSCKRTYHADLDVATHNLTQVAGTGLPMPEREHPGGTKKPGGSRKPESPQTHAPILHRTDYSESADRLGS

SEQ ID NO: 41 - protein, 733 aa, unidentified
  REGION 1..733: note = Description of Unknown:CasPhi sequence
QAVIKYLSDKGAVDPPDFRPPAKCNIIAQSRPFDEWPICKASMAIQQHIYGLTKNEFDESSPGTSSASHEQWFAKTGVDTHGFTHVQGLNLIFQHAKKRYEGVIKKVENYNEKERKKFEGINERRSKEGMPLLEPRLRTAFGDDGKFAEKPGVNPSIYLYQQTSPRPYDKTKHPYVHAPFELKEITTIPTQDDRLKIPFGAPGHVPEKHRSQLSMAKHKRRRAWYALSQNKPRPPKDGSKGRRSVRDLADLKAASLADAIPLVSRVGFDWVVIDGRGLLRNLRWRKLAHEGMTVEEMLGFFSGDPVIDPRRNVATFIYKAEHATVKSRKPIGGAKRAREELLKATASSDGVIRQVGLISVDLGQTNPVAYEISRMHQANGELVAEHLEYGLLNDEQVNSIQRYRAAWDSMNESFRQKAIESLSMEAQDEIMQASTGAAKRTREAVLTMFGPNATLPWSRMSSNTTCISDALIEVGKEEETNFVTSNGPRKRTDAQWAAYLRPRVNPETRALLNQAVWDLMKRSDEYERLSKRKLEMARQCVNFVVARAEKLTQCNNIGIVLENLVVRNFHGSGRRESGWEGFFEPKRENRWFMQVLHKAFSDLAQHRGVMVFEVHPAYSSQTCPACRYVDPKNRSSEDRERFKCLKCGRSFNADREVATFNIREIARTGVGLPKPDCERSRDVQTPGTARKSGRSLKSQDNLSEPKRVLQSKTRKKITSTETQNEPLATDLKT

SEQ ID NO: 42 - protein, 702 aa, unidentified
  REGION 1..702: note = Description of Unknown:CasPhi sequence
MIKEQSELSKLIEKYYPGKKFYSNDLKQAGKHLKKSEHLTAKESEELTVEFLKSCKEKLYDFRPPAKALIISTSRPFEEWPIYKASESIQKYIYSLTKEELEKYNISTDKTSQENFFKESLIDNYGFANVSGLNLIFQHTKAIYDGVLKKVNNRNNKILKKYKRKIEEGIEIDSPELEKAIDESGHFINPPGINKNIYCYQQVSPTIFNSFKETKIICPFNYKRNPNDIIQKGVIDRLAIPFGEPGYIPDHQRDKVNKHKKRIRKYYKNNENKNKDAILAKINIGEDWVLFDLRGLLRNAYWRKLIPKQGITPQQLLDMFSGDPVIDPIKNNITFIYKESIIPIHSESIIKTKKSKELLEKLTKDEQIALVSIDLGQTNPVAARFSRLSSDLKPEHVSSSFLPDELKNEICRYREKSDLLEIEIKNKAIKMLSQEQQDEIKLVNDISSEELKNSVCKKYNIDNSKIPWDKMNGFTTFIADEFINNGGDKSLVYFTAKDKKSKKEKLVKLSDKKIANSFKPKISKETREILNKITWDEKISSNEYKKLSKRKLEFARRATNYLINQAKKATRLNNVVLVVEDLNSKFFHGSGKREDGWDNFFIPKKENRWFIQALHKSLTDVSIHRGINVIEVRPERTSITCPKCGCCDKENRKGEDFKCIKCDSVYHADLEVATFNIEKVAITGESMPKPDCERLGGEESIG

SEQ ID NO: 43 - protein, 661 aa, unidentified
  REGION 1..661: note = Description of Unknown:CasPhi sequence
VAFLDGKEVDEPYTLQPPAKCHILAVSRPIEEWPIARVTMAVQEHVYALPVHEVEKSRPETTEGSRSAWFKNSGVSNHGVTHAQTLNAILKNAYNVYNGVIKKVENRNAKKRDSLAAKNKSRERKGLPHFKADPPELATDEQGYLLQPPSPNSSVYLVQQHLRTPQIDLPSGYTGPVVDPRSPIPSLIPIDRLAIPPGQPGYVPLHDREKLTSNKHRRMKLPKSLRAQGALPVCFRVFDDWAVVDGRGLLRHAQYRRLAPKNVSIAELLELYTGDPVIDIKRNLMTFRFAEAVVEVTARKIVEKYHNKYLLKLTEPKGKPVREIGLVSIDLNVQRLIALAIYRVHQTGESQLALSPCLHREILPAKGLGDFDKYKSKFNQLTEEILTAAVQTLTSAQQEEYQRYVEESSHEAKADLCLKYSITPHELAWDKMTSSTQYISRWLRDHGWNASDFTQITKGRKKVERLWSDSRWAQELKPKLSNETRRKLEDAKHDLQRANPEWQRLAKRKQEYSRHLANTVLSMAREYTACETVVIAIENLPMKGGFVDGNGSRESGWDNFFTHKKENRWMIKDIHKALSDLAPNRGVHVLEVNPQYTSQTCPECGHRDKANRDPIQRERFCCTHCGAQRHADLEVATHNIAMVATTGKSLTGKSLAPQRLQ

SEQ ID NO: 44 - protein, 531 aa, unidentified
  REGION 1..531: note = Description of Unknown:CasPhi sequence
LEIPEGEPGHVPWFQRMDIPEGQIGHVNKIQRFNFVHGKNSGKVKFSDKTGRVKRYHHSKYKDATKPYKFLEESKKVSALDSILAIITIGDDWVVFDIRGLYRNVFYRELAQKGLTAVQLLDLFTGDPVIDPKKGIITFSYKEGVVPVFSQKIVSRFKSRDTLEKLTSQGPVALLSVDLGQNEPVAARVCSLKNINDKIALDNSCRIPFLDDYKKQIKDYRDSLDELEIKIRLEAINSLDVNQQVEIRDLDVFSADRAKASTVDMFDIDPNLISWDSMSDARFSTQISDLYLKNGGDESRVYFEINNKRIKRSDYNISQLVRPKLSDSTRKNLNDSIWKLKRTSEEYLKLSKRKLELSRAVVNYTIRQSKLLSGINDIVIILEDLDVKKKFNGRGIRDIGWDNFFSSRKENRWFIPAFHKSFSELSSNRGLCVIEVNPAWTSATCPDCGFCSKENRDGINFTCRKCGVSYHADIDVATLNIARVAVLGKPMSGPADRERLGGTKKPRVARSRKDMKRKDISNGTVEVMVTA

SEQ ID NO: 45 - protein, 479 aa, unidentified
  REGION 1..479: note = Description of Unknown:CasPhi sequence
IPSFGYLDRLKIAKGQPGYIPEWQRETINPSKKVRRYWATNHEKIRNAIPLVVFIGDDWVIIDGRGLLRDARRRKLADKNTTIEQLLEMVSNDPVIDSTRGIATLSYVEGVVPVRSFIPIGEKKGREYLEKSTQKESVTLLSVDIGQINPVSCGVYKVSNGCSKIDFLDKFFLDKKHLDAIQKYRTLQDSLEASIVNEALDEIDPSFKKEYQNINSQTSNDVKKSLCTEYNIDPEAISWQDITAHSTLISDYLIDNNITNDVYRTVNKAKYKTNDFGWYKKFSAKLSKEAREALNEKIWELKIASSKYKKLSVRKKEIARTIANDCVKRAETYGDNVVVAMESLTKNNKVMSGRGKRDPGWHNLGQAKVENRWFIQAISSAFEDKATHHGTPVLKVNPAYTSQTCPSCGHCSKDNRSSKDRTIFVCKSCGEKFNADLDVATYNIAHVAFSGKKLSPPSEKSSATKKPRSARKSKKSRKS

SEQ ID NO: 46 - protein, 452 aa, unidentified
  REGION 1..452: note = Description of Unknown:CasPhi sequence
SPIEKLLNGLLVKITFGNDWIICDARGLLDNVQKGIIHKSYFTNKSSLVDLIDLFTCNPIVNYKNNVVTFCYKEGVVDVKSFTPIKSGPKTQENLIKKLKYSRFQNEKDACVLGVGVDVGVTNPFAINGFKMPVDESSEWVMLNEPLFTIETSQAFREEIMAYQQRTDEMNDQFNQQSIDLLPPEYKVEFDNLPEDINEVAKYNLLHTLNIPNNFLWDKMSNTTQFISDYLIQIGRGTETEKTITTKKGKEKILTIRDVNWFNTFKPKISEETGKARTEIKRDLQKNSDQFQKLAKSREQSCRTWVNNVTEEAKIKSGCPLIIFVIEALVKDNRVFSGKGHRAIGWHNFGKQKNERRWWVQAIHKAFQEQGVNHGYPVILCPPQYTSQTCPKCNHVDRDNRSGEKFKCLKYGWIGNADLDVGAYNIARVAITGKALSKPLEQKKIKKAKNKT

SEQ ID NO: 47 - protein, 425 aa, unidentified
  REGION 1..425: note = Description of Unknown:CasPhi sequence
LLDNVQKGIIHKSYFTNKSSLVDLIDLFTCNPIVNYKNNVVTFCYKEGVVDVKSFTPIKSGPKTQENLIKKLKYSRFQNEKDACVLGVGVDVGVTNPFAINGFKMPVDESSEWVMLNEPLFTIETSQAFREEIMAYQQRTDEMNDQFNQQSIDLLPPEYKVEFDNLPEDINEVAKYNLLHTLNIPNNFLWDKMSNTTQFISDYLIQIGRGTETEKTITTKKGKEKILTIRDVNWFNTFKPKISEETGKARTEIKRDLQKNSDQFQKLAKSREQSCRTWVNNVTEEAKIKSGCPLIIFVIEALVKDNRVFSGKGHRAIGWHNFGKQKNERRWWVQAIHKAFQEQGVNHGYPVILCPPQYTSQTCPKCNHVDRDNRSGEKFKCLKYGWIGNADLDVGAYNIARVAITGKALSKPLEQKKIKKAKNKT

SEQ ID NO: 48 - DNA, 36 bp, synthetic construct
  misc_feature 1..36: note = Description of Artificial Sequence: Syntheticoligonucleotide
  source 1..36: mol_type = other DNA
ggagagatctcaaacgattgctcgattagtcgagac

SEQ ID NO: 49 - DNA, 36 bp, synthetic construct
  misc_feature 1..36: note = Description of Artificial Sequence: Syntheticoligonucleotide
  source 1..36: mol_type = other DNA
gtcggaacgctcaacgattgcccctcacgaggggac

SEQ ID NO: 50 - DNA, 36 bp, synthetic construct
  misc_feature 1..36: note = Description of Artificial Sequence: Syntheticoligonucleotide
  source 1..36: mol_type = other DNA
accaaaacgactattgattgcccagtacgctgggac

SEQ ID NO: 51 - DNA, 37 bp, synthetic construct
  misc_feature 1..37: note = Description of Artificial Sequence: Syntheticoligonucleotide
  source 1..37: mol_type = other DNA
ggatccaatcctttttgattgcccaattcgttgggac

SEQ ID NO: 52 - DNA, 36 bp, synthetic construct
  misc_feature 1..36: note = Description of Artificial Sequence: Syntheticoligonucleotide
  source 1..36: mol_type = other DNA
ggatctgaggatcattattgctcgttacgacgagac

SEQ ID NO: 53 - DNA, 36 bp, synthetic construct
  misc_feature 1..36: note = Description of Artificial Sequence: Syntheticoligonucleotide
  source 1..36: mol_type = other DNA
cctgcgaaaccttttgattgctcagtacgctgagac

SEQ ID NO: 54 - DNA, 36 bp, synthetic construct
  misc_feature 1..36: note = Description of Artificial Sequence: Syntheticoligonucleotide
  source 1..36: mol_type = other DNA
ctttcaagactaatagattgctccttacgaggagac

SEQ ID NO: 55 - DNA, 36 bp, synthetic construct
  misc_feature 1..36: note = Description of Artificial Sequence: Syntheticoligonucleotide
  source 1..36: mol_type = other DNA
gtagaagacctcgctgattgctcggtgcgccgagac

SEQ ID NO: 56 - DNA, 36 bp, synthetic construct
  misc_feature 1..36: note = Description of Artificial Sequence: Syntheticoligonucleotide
  source 1..36: mol_type = other DNA
atggcaacagactctcattgcgcggtacgccgcgac

SEQ ID NO: 57 - DNA, 36 bp, synthetic construct; identical to SEQ ID NO: 50
  misc_feature 1..36: note = Description of Artificial Sequence: Syntheticoligonucleotide
  source 1..36: mol_type = other DNA

SEQ ID NO: 58 - DNA, 34 bp, synthetic construct
  misc_feature 1..34: note = Description of Artificial Sequence: Syntheticoligonucleotide
  source 1..34: mol_type = other DNA
gtcgctctctaacgcttgcccagtacgctgggac

SEQ ID NO: 59 - DNA, 36 bp, synthetic construct
  misc_feature 1..36: note = Description of Artificial Sequence: Syntheticoligonucleotide
  source 1..36: mol_type = other DNA
gctggaagactcaatgatggctccttacgaggagac

SEQ ID NO: 60 - DNA, 37 bp, synthetic construct
  misc_feature 1..37: note = Description of Artificial Sequence: Syntheticoligonucleotide
  source 1..37: mol_type = other DNA
ggttgaaccctcaacagattgctcggtaagccgagac

SEQ ID NO: 61 - DNA, 37 bp, synthetic construct; identical to SEQ ID NO: 60
  misc_feature 1..37: note = Description of Artificial Sequence: Syntheticoligonucleotide
  source 1..37: mol_type = other DNA

SEQ ID NO: 62 - DNA, 36 bp, synthetic construct
  misc_feature 1..36: note = Description of Artificial Sequence: Syntheticoligonucleotide
  source 1..36: mol_type = other DNA
cttgaaatcctgtcagattgctcccttcggggagac

SEQ ID NO: 63 - DNA, 36 bp, synthetic construct; identical to SEQ ID NO: 59
  misc_feature 1..36: note = Description of Artificial Sequence: Syntheticoligonucleotide
  source 1..36: mol_type = other DNA

SEQ ID NO: 64 - DNA, 36 bp, synthetic construct; identical to SEQ ID NO: 59
  misc_feature 1..36: note = Description of Artificial Sequence: Syntheticoligonucleotide
  source 1..36: mol_type = other DNA

SEQ ID NO: 65 - DNA, 36 bp, synthetic construct
  misc_feature 1..36: note = Description of Artificial Sequence: Syntheticoligonucleotide
  source 1..36: mol_type = other DNA
ctaggaacgcacgcagattgctcggtacgccgagac

SEQ ID NO: 66 - DNA, 36 bp, synthetic construct
  misc_feature 1..36: note = Description of Artificial Sequence: Syntheticoligonucleotide
  source 1..36: mol_type = other DNA
attgcaacgcctaaagattgctcgatacgtcgagac

SEQ ID NO: 67 - DNA, 36 bp, synthetic construct
  misc_feature 1..36: note = Description of Artificial Sequence: Syntheticoligonucleotide
  source 1..36: mol_type = other DNA
gttcggcraycctttgattgctcagtacgctgagac

SEQ ID NO: 68 - DNA, 36 bp, synthetic construct
  misc_feature 1..36: note = Description of Artificial Sequence: Syntheticoligonucleotide
  source 1..36: mol_type = other DNA
gttgaacctagatcagatggctcagtacgctgagac

SEQ ID NO: 69 - DNA, 36 bp, synthetic construct
  misc_feature 1..36: note = Description of Artificial Sequence: Syntheticoligonucleotide
  source 1..36: mol_type = other DNA
ccctcaacacgtcagaaatgcccggcacgccgggac

SEQ ID NO: 70 - DNA, 36 bp, synthetic construct
  misc_feature 1..36: note = Description of Artificial Sequence: Syntheticoligonucleotide
  source 1..36: mol_type = other DNA
gtcgcaagactcgaataattgcccctctatggggac

SEQ ID NO: 71 - DNA, 37 bp, synthetic construct
  misc_feature 1..37: note = Description of Artificial Sequence: Syntheticoligonucleotide
  source 1..37: mol_type = other DNA
gctggggaccgatcctgattgctcgctgcggcgagac

SEQ ID NO: 72 - DNA, 36 bp, synthetic construct
  misc_feature 1..36: note = Description of Artificial Sequence: Syntheticoligonucleotide
  source 1..36: mol_type = other DNA
ctctcaatggataacgattgctctctacggagagac

SEQ ID NO: 73 - DNA, 36 bp, synthetic construct; identical to SEQ ID NO: 59
  misc_feature 1..36: note = Description of Artificial Sequence: Syntheticoligonucleotide
  source 1..36: mol_type = other DNA

SEQ ID NO: 74 - DNA, 36 bp, synthetic construct
  misc_feature 1..36: note = Description of Artificial Sequence: Syntheticoligonucleotide
  source 1..36: mol_type = other DNA
gttgaaccctcaacagattgctcggtaagccgagac

SEQ ID NO: 75 - DNA, 36 bp, synthetic construct; identical to SEQ ID NO: 70
  misc_feature 1..36: note = Description of Artificial Sequence: Syntheticoligonucleotide
  source 1..36: mol_type = other DNA

SEQ ID NO: 76 - DNA, 36 bp, synthetic construct; identical to SEQ ID NO: 49
  misc_feature 1..36: note = Description of Artificial Sequence: Syntheticoligonucleotide
  source 1..36: mol_type = other DNA

SEQ ID NO: 77 - DNA, 36 bp, synthetic construct; identical to SEQ ID NO: 68
  misc_feature 1..36: note = Description of Artificial Sequence: Syntheticoligonucleotide
  source 1..36: mol_type = other DNA

SEQ ID NO: 78 - DNA, 36 bp, synthetic construct; identical to SEQ ID NO: 72
  misc_feature 1..36: note = Description of Artificial Sequence: Syntheticoligonucleotide
  source 1..36: mol_type = other DNA

SEQ ID NO: 79 - DNA, 36 bp, synthetic construct
  misc_feature 1..36: note = Description of Artificial Sequence: Syntheticoligonucleotide
  source 1..36: mol_type = other DNA
actgaaaccaccaacgattgcgctcctcggagcgac

SEQ ID NO: 80 - DNA, 36 bp, synthetic construct; identical to SEQ ID NO: 50
  misc_feature 1..36: note = Description of Artificial Sequence: Syntheticoligonucleotide
  source 1..36: mol_type = other DNA

SEQ ID NO: 81 - DNA, 36 bp, synthetic construct; identical to SEQ ID NO: 68
  misc_feature 1..36: note = Description of Artificial Sequence: Syntheticoligonucleotide
  source 1..36: mol_type = other DNA

SEQ ID NO: 82 - DNA, 36 bp, synthetic construct; identical to SEQ ID NO: 74
  misc_feature 1..36: note = Description of Artificial Sequence: Syntheticoligonucleotide
  source 1..36: mol_type = other DNA

SEQ ID NO: 83 - DNA, 36 bp, synthetic construct; identical to SEQ ID NO: 68
  misc_feature 1..36: note = Description of Artificial Sequence: Syntheticoligonucleotide
  source 1..36: mol_type = other DNA

SEQ ID NO: 84 - DNA, 36 bp, synthetic construct; identical to SEQ ID NO: 49
  misc_feature 1..36: note = Description of Artificial Sequence: Syntheticoligonucleotide
  source 1..36: mol_type = other DNA

SEQ ID NO: 85 - DNA, 37 bp, synthetic construct; identical to SEQ ID NO: 60
  misc_feature 1..37: note = Description of Artificial Sequence: Syntheticoligonucleotide
  source 1..37: mol_type = other DNA

SEQ ID NO: 86 - DNA, 37 bp, synthetic construct; identical to SEQ ID NO: 60
  misc_feature 1..37: note = Description of Artificial Sequence: Syntheticoligonucleotide
  source 1..37: mol_type = other DNA

SEQ ID NO: 87-97 - skipped (11 entries)

SEQ ID NO: 98 - DNA, 10 bp, synthetic construct
  misc_feature 1..10: note = Description of Artificial Sequence: Syntheticoligonucleotide
  source 1..10: mol_type = other DNA
tttttttttt

SEQ ID NO: 99 - DNA, 12 bp, synthetic construct
  misc_feature 1..12: note = Description of Artificial Sequence: Syntheticoligonucleotide
  source 1..12: mol_type = other DNA
tttttttttttt

SEQ ID NO: 100 - DNA, 14 bp, synthetic construct
  misc_feature 1..14: note = Description of Artificial Sequence: Syntheticoligonucleotide
  source 1..14: mol_type = other DNA
tttttttttttttt

SEQ ID NO: 101-104 - skipped (4 entries)

SEQ ID NO: 105 - protein, 735 aa, unidentified
  REGION 1..735: note = Description of Unknown:CasPhi sequence
MIKPTVSQFLTPGFKLIRNHSRTAGLKLKNEGEEACKKFVRENEIPKDECPNFQGGPAIANIIAKSREFTEWEIYQSSLAIQEVIFTLPKDKLPEPILKEEWRAQWLSEHGLDTVPYKEAAGLNLIIKNAVNTYKGVQVKVDNKNKNNLAKINRKNEIAKLNGEQEISFEEIKAFDDKGYLLQKPSPNKSIYCYQSVSPKPFITSKYHNVNLPEEYIGYYRKSNEPIVSPYQFDRLRIPIGEPGYVPKWQYTFLSKKENKRRKLSKRIKNVSPILGIICIKKDWCVFDMRGLLRTNHWKKYHKPTDSINDLFDYFTGDPVIDTKANVVRFRYKMENGIVNYKPVREKKGKELLENICDQNGSCKLATVDVGQNNPVAIGLFELKKVNGELTKTLISRHPTPIDFCNKITAYRERYDKLESSIKLDAIKQLTSEQKIEVDNYNNNFTPQNTKQIVCSKLNINPNDLPWDKMISGTHFISEKAQVSNKSEIYFTSTDKGKTKDVMKSDYKWFQDYKPKLSKEVRDALSDIEWRLRRESLEFNKLSKSREQDARQLANWISSMCDVIGIENLVKKNNFFGGSGKREPGWDNFYKPKKENRWWINAIHKALTELSQNKGKRVILLPAMRTSITCPKCKYCDSKNRNGEKFNCLKCGIELNADIDVATENLATVAITAQSMPKPTCERSGDAKKPVRARKAKAPEFHDKLAPSYTVVLREAVKRPAATKKAGQAKKKKEF

SEQ ID NO: 106 - protein, 18 aa, unidentified
  REGION 1..18: note = Description of Unknown:Nucleoplasmin NLS sequence
KRPAATKKAGQAKKKKEF

SEQ ID NO: 107 - protein, 753 aa, unidentified
  REGION 1..753: note = Description of Unknown:CasPhi sequence
SNAPKKKRKVGIHGVPAAMIKPTVSQFLTPGFKLIRNHSRTAGLKLKNEGEEACKKFVRENEIPKDECPNFQGGPAIANIIAKSREFTEWEIYQSSLAIQEVIFTLPKDKLPEPILKEEWRAQWLSEHGLDTVPYKEAAGLNLIIKNAVNTYKGVQVKVDNKNKNNLAKINRKNEIAKLNGEQEISFEEIKAFDDKGYLLQKPSPNKSIYCYQSVSPKPFITSKYHNVNLPEEYIGYYRKSNEPIVSPYQFDRLRIPIGEPGYVPKWQYTFLSKKENKRRKLSKRIKNVSPILGIICIKKDWCVFDMRGLLRTNHWKKYHKPTDSINDLFDYFTGDPVIDTKANVVRFRYKMENGIVNYKPVREKKGKELLENICDQNGSCKLATVDVGQNNPVAIGLFELKKVNGELTKTLISRHPTPIDFCNKITAYRERYDKLESSIKLDAIKQLTSEQKIEVDNYNNNFTPQNTKQIVCSKLNINPNDLPWDKMISGTHFISEKAQVSNKSEIYFTSTDKGKTKDVMKSDYKWFQDYKPKLSKEVRDALSDIEWRLRRESLEFNKLSKSREQDARQLANWISSMCDVIGIENLVKKNNFFGGSGKREPGWDNFYKPKKENRWWINAIHKALTELSQNKGKRVILLPAMRTSITCPKCKYCDSKNRNGEKFNCLKCGIELNADIDVATENLATVAITAQSMPKPTCERSGDAKKPVRARKAKAPEFHDKLAPSYTVVLREAVKRPAATKKAGQAKKKKEF

SEQ ID NO: 108 - DNA, 30 bp, synthetic construct
  misc_feature 1..30: note = Description of Artificial Sequence: Syntheticoligonucleotide
  source 1..30: mol_type = other DNA
tattaaatactcgtattgctgttcgattat

SEQ ID NO: 109 - DNA, 30 bp, synthetic construct
  misc_feature 1..30: note = Description of Artificial Sequence: Syntheticoligonucleotide
  source 1..30: mol_type = other DNA
cacagcttgtctgtaagcggatgccatatg

SEQ ID NO: 110 - protein, 7 aa, Macaca mulatta
PKKKRKV

SEQ ID NO: 111 - protein, 9 aa, unidentified
  REGION 1..9: note = Description of Unknown:C-myc NLS sequence
PAAKRVKLD

SEQ ID NO: 112 - protein, 15 aa, Macaca mulatta
PKKKRKVGIHGVPAA

SEQ ID NO: 113 - protein, 10 aa, synthetic construct
  REGION 1..10: note = Description of Artificial Sequence: Syntheticpeptide
MISKMIKPTV

SEQ ID NO: 114 - protein, 10 aa, synthetic construct
  REGION 1..10: note = Description of Artificial Sequence: Syntheticpeptide
MISKMIKPTV

SEQ ID NO: 115 - protein, 4 aa, synthetic construct
  REGION 1..4: note = Description of Artificial Sequence: Syntheticpeptide
MISK

SEQ ID NO: 116 - DNA, 30 bp, synthetic construct; identical to SEQ ID NO: 108
  misc_feature 1..30: note = Description of Artificial Sequence: Syntheticoligonucleotide
  source 1..30: mol_type = other DNA

SEQ ID NO: 117 - DNA, 30 bp, synthetic construct; identical to SEQ ID NO: 109
  misc_feature 1..30: note = Description of Artificial Sequence: Syntheticoligonucleotide
  source 1..30: mol_type = other DNA

SEQ ID NO: 118 - DNA, 20 bp, synthetic construct
  misc_feature 1..20: note = Description of Artificial Sequence: Syntheticoligonucleotide
  source 1..20: mol_type = other DNA
tggatatctgtgggacaaga

SEQ ID NO: 119 - DNA, 20 bp, synthetic construct
  misc_feature 1..20: note = Description of Artificial Sequence: Syntheticoligonucleotide
  source 1..20: mol_type = other DNA
tcccacagatatccagaacc

SEQ ID NO: 120 - DNA, 20 bp, synthetic construct
  misc_feature 1..20: note = Description of Artificial Sequence: Syntheticoligonucleotide
  source 1..20: mol_type = other DNA
gagtctctcagctggtacac

SEQ ID NO: 121 - DNA, 20 bp, synthetic construct
  misc_feature 1..20: note = Description of Artificial Sequence: Syntheticoligonucleotide
  source 1..20: mol_type = other DNA
agagtctctcagctggtaca

SEQ ID NO: 122 - DNA, 20 bp, synthetic construct
  misc_feature 1..20: note = Description of Artificial Sequence: Syntheticoligonucleotide
  source 1..20: mol_type = other DNA
tcactggatttagagtctct

SEQ ID NO: 123 - DNA, 20 bp, synthetic construct
  misc_feature 1..20: note = Description of Artificial Sequence: Syntheticoligonucleotide
  source 1..20: mol_type = other DNA
agaatcaaaatcggtgaata

SEQ ID NO: 124 - DNA, 20 bp, synthetic construct
  misc_feature 1..20: note = Description of Artificial Sequence: Syntheticoligonucleotide
  source 1..20: mol_type = other DNA
gagaatcaaaatcggtgaat

SEQ ID NO: 125 - DNA, 20 bp, synthetic construct
  misc_feature 1..20: note = Description of Artificial Sequence: Syntheticoligonucleotide
  source 1..20: mol_type = other DNA
accgattttgattctcaaac

SEQ ID NO: 126 - DNA, 20 bp, synthetic construct
  misc_feature 1..20: note = Description of Artificial Sequence: Syntheticoligonucleotide
  source 1..20: mol_type = other DNA
tttgagaatcaaaatcggtg

SEQ ID NO: 127 - DNA, 20 bp, synthetic construct
  misc_feature 1..20: note = Description of Artificial Sequence: Syntheticoligonucleotide
  source 1..20: mol_type = other DNA
gtttgagaatcaaaatcggt

SEQ ID NO: 128 - DNA, 20 bp, synthetic construct
  misc_feature 1..20: note = Description of Artificial Sequence: Syntheticoligonucleotide
  source 1..20: mol_type = other DNA
tgattctcaaacaaatgtgt

SEQ ID NO: 129 - DNA, 20 bp, synthetic construct
  misc_feature 1..20: note = Description of Artificial Sequence: Syntheticoligonucleotide
  source 1..20: mol_type = other DNA
gattctcaaacaaatgtgtc

SEQ ID NO: 130 - DNA, 20 bp, synthetic construct
  misc_feature 1..20: note = Description of Artificial Sequence: Syntheticoligonucleotide
  source 1..20: mol_type = other DNA
attctcaaacaaatgtgtca

SEQ ID NO: 131 - DNA, 20 bp, synthetic construct
  misc_feature 1..20: note = Description of Artificial Sequence: Syntheticoligonucleotide
  source 1..20: mol_type = other DNA
tgacacatttgtttgagaat

SEQ ID NO: 132 - DNA, 20 bp, synthetic construct
  misc_feature 1..20: note = Description of Artificial Sequence: Syntheticoligonucleotide
  source 1..20: mol_type = other DNA
tcaaacaaatgtgtcacaaa

SEQ ID NO: 133 - DNA, 20 bp, synthetic construct
  misc_feature 1..20: note = Description of Artificial Sequence: Syntheticoligonucleotide
  source 1..20: mol_type = other DNA
gtgacacatttgtttgagaa

SEQ ID NO: 134 - DNA, 20 bp, synthetic construct
  misc_feature 1..20: note = Description of Artificial Sequence: Syntheticoligonucleotide
  source 1..20: mol_type = other DNA
ctttgtgacacatttgtttg

SEQ ID NO: 135 - DNA, 20 bp, synthetic construct
  misc_feature 1..20: note = Description of Artificial Sequence: Syntheticoligonucleotide
  source 1..20: mol_type = other DNA
tgatgtgtatatcacagaca

SEQ ID NO: 136 - DNA, 20 bp, synthetic construct
  misc_feature 1..20: note = Description of Artificial Sequence: Syntheticoligonucleotide
  source 1..20: mol_type = other DNA
tctgtgatatacacatcaga

SEQ ID NO: 137 - DNA, 20 bp, synthetic construct
  misc_feature 1..20: note = Description of Artificial Sequence: Syntheticoligonucleotide
  source 1..20: mol_type = other DNA
gtctgtgatatacacatcag

SEQ ID NO: 138 - DNA, 20 bp, synthetic construct
  misc_feature 1..20: note = Description of Artificial Sequence: Syntheticoligonucleotide
  source 1..20: mol_type = other DNA
tgtctgtgatatacacatca

SEQ ID NO: 139 - DNA, 20 bp, synthetic construct
  misc_feature 1..20: note = Description of Artificial Sequence: Syntheticoligonucleotide
  source 1..20: mol_type = other DNA
aagtccatagacctcatgtc

SEQ ID NO: 140 - DNA, 20 bp, synthetic construct
  misc_feature 1..20: note = Description of Artificial Sequence: Syntheticoligonucleotide
  source 1..20: mol_type = other DNA
ctcttgaagtccatagacct

SEQ ID NO: 141 - DNA, 20 bp, synthetic construct
  misc_feature 1..20: note = Description of Artificial Sequence: Syntheticoligonucleotide
  source 1..20: mol_type = other DNA
aagagcaacagtgctgtggc

SEQ ID NO: 142 - DNA, 20 bp, synthetic construct
  misc_feature 1..20: note = Description of Artificial Sequence: Syntheticoligonucleotide
  source 1..20: mol_type = other DNA
ctccaggccacagcactgtt

SEQ ID NO: 143 - DNA, 20 bp, synthetic construct
  misc_feature 1..20: note = Description of Artificial Sequence: Syntheticoligonucleotide
  source 1..20: mol_type = other DNA
ttgctccaggccacagcact

SEQ ID NO: 144 - DNA, 20 bp, synthetic construct
  misc_feature 1..20: note = Description of Artificial Sequence: Syntheticoligonucleotide
  source 1..20: mol_type = other DNA
gttgctccaggccacagcac

SEQ ID NO: 145 - DNA, 20 bp, synthetic construct
  misc_feature 1..20: note = Description of Artificial Sequence: Syntheticoligonucleotide
  source 1..20: mol_type = other DNA
cacatgcaaagtcagatttg

SEQ ID NO: 146 - DNA, 20 bp, synthetic construct
  misc_feature 1..20: note = Description of Artificial Sequence: Syntheticoligonucleotide
  source 1..20: mol_type = other DNA
gcacatgcaaagtcagattt

SEQ ID NO: 147 - DNA, 20 bp, synthetic construct
  misc_feature 1..20: note = Description of Artificial Sequence: Syntheticoligonucleotide
  source 1..20: mol_type = other DNA
gcatgtgcaaacgccttcaa

SEQ ID NO: 148 - DNA, 20 bp, synthetic construct
  misc_feature 1..20: note = Description of Artificial Sequence: Syntheticoligonucleotide
  source 1..20: mol_type = other DNA
aaggcgtttgcacatgcaaa

SEQ ID NO: 149 - DNA, 20 bp, synthetic construct
  misc_feature 1..20: note = Description of Artificial Sequence: Syntheticoligonucleotide
  source 1..20: mol_type = other DNA
catgtgcaaacgccttcaac

SEQ ID NO: 150 - DNA, 20 bp, synthetic construct
  misc_feature 1..20: note = Description of Artificial Sequence: Syntheticoligonucleotide
  source 1..20: mol_type = other DNA
ttgaaggcgtttgcacatgc

SEQ ID NO: 151 - DNA, 20 bp, synthetic construct
  misc_feature 1..20: note = Description of Artificial Sequence: Syntheticoligonucleotide
  source 1..20: mol_type = other DNA
aacaacagcattattccaga

SEQ ID NO: 152 - DNA, 20 bp, synthetic construct
  misc_feature 1..20: note = Description of Artificial Sequence: Syntheticoligonucleotide
  source 1..20: mol_type = other DNA
tggaataatgctgttgttga

SEQ ID NO: 153 - DNA, 20 bp, synthetic construct
  misc_feature 1..20: note = Description of Artificial Sequence: Syntheticoligonucleotide
  source 1..20: mol_type = other DNA
ttccagaagacaccttcttc

SEQ ID NO: 154 - DNA, 20 bp, synthetic construct
  misc_feature 1..20: note = Description of Artificial Sequence: Syntheticoligonucleotide
  source 1..20: mol_type = other DNA
cagaagacaccttcttcccc

SEQ ID NO: 155 - DNA, 20 bp, synthetic construct
  misc_feature 1..20: note = Description of Artificial Sequence: Syntheticoligonucleotide
  source 1..20: mol_type = other DNA
cctgggctggggaagaaggt

SEQ ID NO: 156 - DNA, 20 bp, synthetic construct
  misc_feature 1..20: note = Description of Artificial Sequence: Syntheticoligonucleotide
  source 1..20: mol_type = other DNA
ttccccagcccaggtaaggg

SEQ ID NO: 157 - DNA, 20 bp, synthetic construct
  misc_feature 1..20: note = Description of Artificial Sequence: Syntheticoligonucleotide
  source 1..20: mol_type = other DNA
cccagcccaggtaagggcag

SEQ ID NO: 158 - DNA, 20 bp, synthetic construct
  misc_feature 1..20: note = Description of Artificial Sequence: Syntheticoligonucleotide
  source 1..20: mol_type = other DNA
taaaaggaaaaacagacatt

SEQ ID NO: 159 - DNA, 20 bp, synthetic construct
  misc_feature 1..20: note = Description of Artificial Sequence: Syntheticoligonucleotide
  source 1..20: mol_type = other DNA
ctaaaaggaaaaacagacat

SEQ ID NO: 160 - DNA, 20 bp, synthetic construct
  misc_feature 1..20: note = Description of Artificial Sequence: Syntheticoligonucleotide
  source 1..20: mol_type = other DNA
ttccttttagaaagttcctg

SEQ ID NO: 161 - DNA, 20 bp, synthetic construct
  misc_feature 1..20: note = Description of Artificial Sequence: Syntheticoligonucleotide
  source 1..20: mol_type = other DNA
tccttttagaaagttcctgt

SEQ ID NO: 162 - DNA, 20 bp, synthetic construct
  misc_feature 1..20: note = Description of Artificial Sequence: Syntheticoligonucleotide
  source 1..20: mol_type = other DNA
ccttttagaaagttcctgtg

SEQ ID NO: 163 - DNA, 20 bp, synthetic construct
  misc_feature 1..20: note = Description of Artificial Sequence: Syntheticoligonucleotide
  source 1..20: mol_type = other DNA
cttttagaaagttcctgtga

SEQ ID NO: 164 - DNA, 20 bp, synthetic construct
  misc_feature 1..20: note = Description of Artificial Sequence: Syntheticoligonucleotide
  source 1..20: mol_type = other DNA
tagaaagttcctgtgatgtc

SEQ ID NO: 165 - DNA, 20 bp, synthetic construct
  misc_feature 1..20: note = Description of Artificial Sequence: Syntheticoligonucleotide
  source 1..20: mol_type = other DNA
agaaagttcctgtgatgtca

SEQ ID NO: 166 - DNA, 20 bp, synthetic construct
  misc_feature 1..20: note = Description of Artificial Sequence: Syntheticoligonucleotide
  source 1..20: mol_type = other DNA
gaaagttcctgtgatgtcaa

SEQ ID NO: 167 - DNA, 20 bp, synthetic construct
  misc_feature 1..20: note = Description of Artificial Sequence: Syntheticoligonucleotide
  source 1..20: mol_type = other DNA
acatcacaggaactttctaa

SEQ ID NO: 168 - DNA, 20 bp, synthetic construct
  misc_feature 1..20: note = Description of Artificial Sequence: Syntheticoligonucleotide
  source 1..20: mol_type = other DNA
ctgtgatgtcaagctggtcg

SEQ ID NO: 169 - DNA, 20 bp, synthetic construct
  misc_feature 1..20: note = Description of Artificial Sequence: Syntheticoligonucleotide
  source 1..20: mol_type = other DNA
tcgaccagcttgacatcaca

SEQ ID NO: 170 - DNA, 20 bp, synthetic construct
  misc_feature 1..20: note = Description of Artificial Sequence: Syntheticoligonucleotide
  source 1..20: mol_type = other DNA
ctcgaccagcttgacatcac

SEQ ID NO: 171 - DNA, 20 bp, synthetic construct
  misc_feature 1..20: note = Description of Artificial Sequence: Syntheticoligonucleotide
  source 1..20: mol_type = other DNA
tctcgaccagcttgacatca

SEQ ID NO: 172 - DNA, 20 bp, synthetic construct
  misc_feature 1..20: note = Description of Artificial Sequence: Syntheticoligonucleotide
  source 1..20: mol_type = other DNA
aaagcttttctcgaccagct

SEQ ID NO: 173 - DNA, 20 bp, synthetic construct
  misc_feature 1..20: note = Description of Artificial Sequence: Syntheticoligonucleotide
  source 1..20: mol_type = other DNA
caaagcttttctcgaccagc

SEQ ID NO: 174 - DNA, 20 bp, synthetic construct
  misc_feature 1..20: note = Description of Artificial Sequence: Syntheticoligonucleotide
  source 1..20: mol_type = other DNA
cctgtttcaaagcttttctc

SEQ ID NO: 175 - DNA, 20 bp, synthetic construct
  misc_feature 1..20: note = Description of Artificial Sequence: Syntheticoligonucleotide
  source 1..20: mol_type = other DNA
gaaacaggtaagacaggggt

SEQ ID NO: 176 - DNA, 20 bp, synthetic construct
  misc_feature 1..20: note = Description of Artificial Sequence: Syntheticoligonucleotide
  source 1..20: mol_type = other DNA
aaacaggtaagacaggggtc

SEQ ID NO: 177 - DNA, 20 bp, synthetic construct
  misc_feature 1..20: note = Description of Artificial Sequence: Syntheticoligonucleotide
  source 1..20: mol_type = other DNA
aatataagtggaggcgtcgc

SEQ ID NO: 178 - DNA, 20 bp, synthetic construct
  misc_feature 1..20: note = Description of Artificial Sequence: Syntheticoligonucleotide
  source 1..20: mol_type = other DNA
atataagtggaggcgtcgcg

SEQ ID NO: 179 - DNA, 20 bp, synthetic construct
  misc_feature 1..20: note = Description of Artificial Sequence: Syntheticoligonucleotide
  source 1..20: mol_type = other DNA
aggaatgcccgccagcgcga

SEQ ID NO: 180 - DNA, 20 bp, synthetic construct
  misc_feature 1..20: note = Description of Artificial Sequence: Syntheticoligonucleotide
  source 1..20: mol_type = other DNA
ctgaagctgacagcattcgg

SEQ ID NO: 181 - DNA, 20 bp, synthetic construct
  misc_feature 1..20: note = Description of Artificial Sequence: Syntheticoligonucleotide
  source 1..20: mol_type = other DNA
gggccgagatgtctcgctcc

SEQ ID NO: 182 - DNA, 20 bp, synthetic construct
  misc_feature 1..20: note = Description of Artificial Sequence: Syntheticoligonucleotide
  source 1..20: mol_type = other DNA
gctgtgctcgcgctactctc

SEQ ID NO: 183 - DNA, 20 bp, synthetic construct
  misc_feature 1..20: note = Description of Artificial Sequence: Syntheticoligonucleotide
  source 1..20: mol_type = other DNA
ctggcctggaggctatccag

SEQ ID NO: 184 - DNA, 20 bp, synthetic construct
  misc_feature 1..20: note = Description of Artificial Sequence: Syntheticoligonucleotide
  source 1..20: mol_type = other DNA
tggcctggaggctatccagc

SEQ ID NO: 185 - DNA, 20 bp, synthetic construct
  misc_feature 1..20: note = Description of Artificial Sequence: Syntheticoligonucleotide
  source 1..20: mol_type = other DNA
atgtgtcttttcccgatatt

SEQ ID NO: 186 - DNA, 20 bp, synthetic construct
  misc_feature 1..20: note = Description of Artificial Sequence: Syntheticoligonucleotide
  source 1..20: mol_type = other DNA
tcccgatattcctcaggtac

SEQ ID NO: 187 - DNA, 20 bp, synthetic construct
  misc_feature 1..20: note = Description of Artificial Sequence: Syntheticoligonucleotide
  source 1..20: mol_type = other DNA
cccgatattcctcaggtact

SEQ ID NO: 188 - DNA, 20 bp, synthetic construct
  misc_feature 1..20: note = Description of Artificial Sequence: Syntheticoligonucleotide
  source 1..20: mol_type = other DNA
ccgatattcctcaggtactc

SEQ ID NO: 189 - DNA, 20 bp, synthetic construct
  misc_feature 1..20: note = Description of Artificial Sequence: Syntheticoligonucleotide
  source 1..20: mol_type = other DNA
gagtacctgaggaatatcgg

SEQ ID NO: 190 - DNA, 20 bp, synthetic construct
  misc_feature 1..20: note = Description of Artificial Sequence: Syntheticoligonucleotide
  source 1..20: mol_type = other DNA
ggagtacctgaggaatatcg

SEQ ID NO: 191 - DNA, 20 bp, synthetic construct
  misc_feature 1..20: note = Description of Artificial Sequence: Syntheticoligonucleotide
  source 1..20: mol_type = other DNA
ctcaggtactccaaagattc

SEQ ID NO: 192 - DNA, 20 bp, synthetic construct
  misc_feature 1..20: note = Description of Artificial Sequence: Syntheticoligonucleotide
  source 1..20: mol_type = other DNA
aggtttactcacgtcatcca

SEQ ID NO: 193 - DNA, 20 bp, synthetic construct
  misc_feature 1..20: note = Description of Artificial Sequence: Syntheticoligonucleotide
  source 1..20: mol_type = other DNA
actcacgtcatccagcagag

SEQ ID NO: 194 - DNA, 20 bp, synthetic construct
  misc_feature 1..20: note = Description of Artificial Sequence: Syntheticoligonucleotide
  source 1..20: mol_type = other DNA
ctcacgtcatccagcagaga

SEQ ID NO: 195 - DNA, 20 bp, synthetic construct
  misc_feature 1..20: note = Description of Artificial Sequence: Syntheticoligonucleotide
  source 1..20: mol_type = other DNA
tctgctggatgacgtgagta

SEQ ID NO: 196 - DNA, 20 bp, synthetic construct
  misc_feature 1..20: note = Description of Artificial Sequence: Syntheticoligonucleotide
  source 1..20: mol_type = other DNA
cattctctgctggatgacgt

SEQ ID NO: 197 - DNA, 20 bp, synthetic construct
  misc_feature 1..20: note = Description of Artificial Sequence: Syntheticoligonucleotide
  source 1..20: mol_type = other DNA
ccattctctgctggatgacg

SEQ ID NO: 198 - DNA, 20 bp, synthetic construct
  misc_feature 1..20: note = Description of Artificial Sequence: Syntheticoligonucleotide
  source 1..20: mol_type = other DNA
actttccattctctgctgga

SEQ ID NO: 199 - DNA, 20 bp, synthetic construct
  misc_feature 1..20: note = Description of Artificial Sequence: Syntheticoligonucleotide
  source 1..20: mol_type = other DNA
gactttccattctctgctgg

SEQ ID NO: 200 - DNA, 20 bp, synthetic construct
  misc_feature 1..20: note = Description of Artificial Sequence: Syntheticoligonucleotide
  source 1..20: mol_type = other DNA
aggaaatttgactttccatt

SEQ ID NO: 201 - DNA, 20 bp, synthetic construct
  misc_feature 1..20: note = Description of Artificial Sequence: Syntheticoligonucleotide
  source 1..20: mol_type = other DNA
cctgaattgctatgtgtctg

SEQ ID NO: 202 - DNA, 20 bp, synthetic construct
  misc_feature 1..20: note = Description of Artificial Sequence: Syntheticoligonucleotide
  source 1..20: mol_type = other DNA
ctgaattgctatgtgtctgg

SEQ ID NO: 203 - DNA, 20 bp, synthetic construct
  misc_feature 1..20: note = Description of Artificial Sequence: Syntheticoligonucleotide
  source 1..20: mol_type = other DNA
ctatgtgtctgggtttcatc

SEQ ID NO: 204 - DNA, 20 bp, synthetic construct
  misc_feature 1..20: note = Description of Artificial Sequence: Syntheticoligonucleotide
  source 1..20: mol_type = other DNA
aatgtcggatggatgaaacc

SEQ ID NO: 205 - DNA, 20 bp, synthetic construct
  misc_feature 1..20: note = Description of Artificial Sequence: Syntheticoligonucleotide
  source 1..20: mol_type = other DNA
catccatccgacattgaagt

SEQ ID NO: 206 - DNA, 20 bp, synthetic construct
  misc_feature 1..20: note = Description of Artificial Sequence: Syntheticoligonucleotide
  source 1..20: mol_type = other DNA
atccatccgacattgaagtt

SEQ ID NO: 207 - DNA, 20 bp, synthetic construct
  misc_feature 1..20: note = Description of Artificial Sequence: Syntheticoligonucleotide
  source 1..20: mol_type = other DNA
agtaagtcaacttcaatgtc

SEQ ID NO: 208 - DNA, 20 bp, synthetic construct
  misc_feature 1..20: note = Description of Artificial Sequence: Syntheticoligonucleotide
  source 1..20: mol_type = other DNA
ttcagtaagtcaacttcaat

SEQ ID NO: 209 - DNA, 20 bp, synthetic construct
  misc_feature 1..20: note = Description of Artificial Sequence: Syntheticoligonucleotide
  source 1..20: mol_type = other DNA
aagttgacttactgaagaat

SEQ ID NO: 210 - DNA, 20 bp, synthetic construct
  misc_feature 1..20: note = Description of Artificial Sequence: Syntheticoligonucleotide
  source 1..20: mol_type = other DNA
acttactgaagaatggagag

SEQ ID NO: 211 - DNA, 20 bp, synthetic construct
  misc_feature 1..20: note = Description of Artificial Sequence: Syntheticoligonucleotide
  source 1..20: mol_type = other DNA
tctctccattcttcagtaag

SEQ ID NO: 212 - DNA, 20 bp, synthetic construct
  misc_feature 1..20: note = Description of Artificial Sequence: Syntheticoligonucleotide
  source 1..20: mol_type = other DNA
ctgaagaatggagagagaat

SEQ ID NO: 213 - DNA, 20 bp, synthetic construct
  misc_feature 1..20: note = Description of Artificial Sequence: Syntheticoligonucleotide
  source 1..20: mol_type = other DNA
aattctctctccattcttca

SEQ ID NO: 214 - DNA, 20 bp, synthetic construct
  misc_feature 1..20: note = Description of Artificial Sequence: Syntheticoligonucleotide
  source 1..20: mol_type = other DNA
caattctctctccattcttc

SEQ ID NO: 215 - DNA, 20 bp, synthetic construct
  misc_feature 1..20: note = Description of Artificial Sequence: Syntheticoligonucleotide
  source 1..20: mol_type = other DNA
tcaattctctctccattctt

SEQ ID NO: 216 - DNA, 20 bp, synthetic construct
  misc_feature 1..20: note = Description of Artificial Sequence: Syntheticoligonucleotide
  source 1..20: mol_type = other DNA
ttcaattctctctccattct

SEQ ID NO: 217 - DNA, 20 bp, synthetic construct
  misc_feature 1..20: note = Description of Artificial Sequence: Syntheticoligonucleotide
  source 1..20: mol_type = other DNA
aaaaagtggagcattcagac

SEQ ID NO: 218 - DNA, 20 bp, synthetic construct
  misc_feature 1..20: note = Description of Artificial Sequence: Syntheticoligonucleotide
  source 1..20: mol_type = other DNA
ctgaaagacaagtctgaatg

SEQ ID NO: 219 - DNA, 20 bp, synthetic construct
  misc_feature 1..20: note = Description of Artificial Sequence: Syntheticoligonucleotide
  source 1..20: mol_type = other DNA
agacttgtctttcagcaagg

SEQ ID NO: 220 - DNA, 20 bp, synthetic construct
  misc_feature 1..20: note = Description of Artificial Sequence: Syntheticoligonucleotide
  source 1..20: mol_type = other DNA
tctttcagcaaggactggtc

SEQ ID NO: 221 - DNA, 20 bp, synthetic construct
  misc_feature 1..20: note = Description of Artificial Sequence: Syntheticoligonucleotide
  source 1..20: mol_type = other DNA
cagcaaggactggtctttct

SEQ ID NO: 222 - DNA, 20 bp, synthetic construct
  misc_feature 1..20: note = Description of Artificial Sequence: Syntheticoligonucleotide
  source 1..20: mol_type = other DNA
agcaaggactggtctttcta

SEQ ID NO: 223 - DNA, 20 bp, synthetic construct
  misc_feature 1..20: note = Description of Artificial Sequence: Syntheticoligonucleotide
  source 1..20: mol_type = other DNA
ctatctcttgtactacactg

SEQ ID NO: 224 - DNA, 20 bp, synthetic construct
  misc_feature 1..20: note = Description of Artificial Sequence: Syntheticoligonucleotide
  source 1..20: mol_type = other DNA
tatctcttgtactacactga

SEQ ID NO: 225 - DNA, 20 bp, synthetic construct
  misc_feature 1..20: note = Description of Artificial Sequence: Syntheticoligonucleotide
  source 1..20: mol_type = other DNA
agtgtagtacaagagataga

SEQ ID NO: 226 - DNA, 20 bp, synthetic construct
  misc_feature 1..20: note = Description of Artificial Sequence: Syntheticoligonucleotide
  source 1..20: mol_type = other DNA
tactacactgaattcacccc

SEQ ID NO: 227 - DNA, 20 bp, synthetic construct
  misc_feature 1..20: note = Description of Artificial Sequence: Syntheticoligonucleotide
  source 1..20: mol_type = other DNA
agtgggggtgaattcagtgt

SEQ ID NO: 228 - DNA, 20 bp, synthetic construct
  misc_feature 1..20: note = Description of Artificial Sequence: Syntheticoligonucleotide
  source 1..20: mol_type = other DNA
cagtgggggtgaattcagtg

SEQ ID NO: 229 - DNA, 20 bp, synthetic construct
  misc_feature 1..20: note = Description of Artificial Sequence: Syntheticoligonucleotide
  source 1..20: mol_type = other DNA
tcagtgggggtgaattcagt

SEQ ID NO: 230 - DNA, 20 bp, synthetic construct
  misc_feature 1..20: note = Description of Artificial Sequence: Syntheticoligonucleotide
  source 1..20: mol_type = other DNA
ttcagtgggggtgaattcag

SEQ ID NO: 231 - DNA, 20 bp, synthetic construct
  misc_feature 1..20: note = Description of Artificial Sequence: Syntheticoligonucleotide
  source 1..20: mol_type = other DNA
acccccactgaaaaagatga

SEQ ID NO: 232 - DNA, 20 bp, synthetic construct
  misc_feature 1..20: note = Description of Artificial Sequence: Syntheticoligonucleotide
  source 1..20: mol_type = other DNA
acacggcaggcatactcatc

SEQ ID NO: 233 - DNA, 20 bp, synthetic construct
  misc_feature 1..20: note = Description of Artificial Sequence: Syntheticoligonucleotide
  source 1..20: mol_type = other DNA
ggctgtgacaaagtcacatg

SEQ ID NO: 234 - DNA, 20 bp, synthetic construct
  misc_feature 1..20: note = Description of Artificial Sequence: Syntheticoligonucleotide
  source 1..20: mol_type = other DNA
gtcacagcccaagatagtta

SEQ ID NO: 235 - DNA, 20 bp, synthetic construct
  misc_feature 1..20: note = Description of Artificial Sequence: Syntheticoligonucleotide
  source 1..20: mol_type = other DNA
tcacagcccaagatagttaa

SEQ ID NO: 236 - DNA, 20 bp, synthetic construct
  misc_feature 1..20: note = Description of Artificial Sequence: Syntheticoligonucleotide
  source 1..20: mol_type = other DNA
actatcttgggctgtgacaa

SEQ ID NO: 237 - DNA, 20 bp, synthetic construct
  misc_feature 1..20: note = Description of Artificial Sequence: Syntheticoligonucleotide
  source 1..20: mol_type = other DNA
ccccacttaactatcttggg

SEQ ID NO: 238 - RNA, 20 nt, synthetic construct
  misc_feature 1..20: note = Description of Artificial Sequence: Syntheticoligonucleotide
  source 1..20: mol_type = other RNA
ccttccgctcacctccgcct

SEQ ID NO: 239 - RNA, 20 nt, synthetic construct
  misc_feature 1..20: note = Description of Artificial Sequence: Syntheticoligonucleotide
  source 1..20: mol_type = other RNA
ccttccgctcacctccgcct

SEQ ID NO: 240 - RNA, 20 nt, synthetic construct
  misc_feature 1..20: note = Description of Artificial Sequence: Syntheticoligonucleotide
  source 1..20: mol_type = other RNA
cgctcacctccgcctgagca

SEQ ID NO: 241 - RNA, 20 nt, synthetic construct
  misc_feature 1..20: note = Description of Artificial Sequence: Syntheticoligonucleotide
  source 1..20: mol_type = other RNA
tccactgctcaggcggaggt

SEQ ID NO: 242 - RNA, 20 nt, synthetic construct
  misc_feature 1..20: note = Description of Artificial Sequence: Syntheticoligonucleotide
  source 1..20: mol_type = other RNA
tagcaccgcccagacgactg

SEQ ID NO: 243 - RNA, 20 nt, synthetic construct
  misc_feature 1..20: note = Description of Artificial Sequence: Syntheticoligonucleotide
  source 1..20: mol_type = other RNA
aggcatgcagatcccacagg

SEQ ID NO: 244 - RNA, 20 nt, synthetic construct
  misc_feature 1..20: note = Description of Artificial Sequence: Syntheticoligonucleotide
  source 1..20: mol_type = other RNA
cacaggcgccctggccagtc

SEQ ID NO: 245 - RNA, 20 nt, synthetic construct
  misc_feature 1..20: note = Description of Artificial Sequence: Syntheticoligonucleotide
  source 1..20: mol_type = other RNA
tctgggcggtgctacaactg

SEQ ID NO: 246 - RNA, 20 nt, synthetic construct
  misc_feature 1..20: note = Description of Artificial Sequence: Syntheticoligonucleotide
  source 1..20: mol_type = other RNA
gcatgcctggagcagcccca

SEQ ID NO: 247 - RNA, 20 nt, synthetic construct
  misc_feature 1..20: note = Description of Artificial Sequence: Syntheticoligonucleotide
  source 1..20: mol_type = other RNA
tagcaccgcccagacgactg

SEQ ID NO: 248 - RNA, 20 nt, synthetic construct
  misc_feature 1..20: note = Description of Artificial Sequence: Syntheticoligonucleotide
  source 1..20: mol_type = other RNA
tggccgccagcccagttgta

SEQ ID NO: 249 - RNA, 20 nt, synthetic construct
  misc_feature 1..20: note = Description of Artificial Sequence: Syntheticoligonucleotide
  source 1..20: mol_type = other RNA
cttccgctcacctccgcctg

SEQ ID NO: 250 - RNA, 20 nt, synthetic construct
  misc_feature 1..20: note = Description of Artificial Sequence: Syntheticoligonucleotide
  source 1..20: mol_type = other RNA
cagggcctgtctggggagtc

SEQ ID NO: 251 - RNA, 20 nt, synthetic construct
  misc_feature 1..20: note = Description of Artificial Sequence: Syntheticoligonucleotide
  source 1..20: mol_type = other RNA
tccccagccctgctcgtggt

SEQ ID NO: 252 - RNA, 20 nt, synthetic construct
  misc_feature 1..20: note = Description of Artificial Sequence: Syntheticoligonucleotide
  source 1..20: mol_type = other RNA
ggtcaccacgagcagggctg

SEQ ID NO: 253 - RNA, 20 nt, synthetic construct
  misc_feature 1..20: note = Description of Artificial Sequence: Syntheticoligonucleotide
  source 1..20: mol_type = other RNA
tccccttcggtcaccacgag

SEQ ID NO: 254 - RNA, 20 nt, synthetic construct
  misc_feature 1..20: note = Description of Artificial Sequence: Syntheticoligonucleotide
  source 1..20: mol_type = other RNA
gagaagctgcaggtgaaggt

SEQ ID NO: 255 - RNA, 20 nt, synthetic construct
  misc_feature 1..20: note = Description of Artificial Sequence: Syntheticoligonucleotide
  source 1..20: mol_type = other RNA
acctgcagcttctccaacac

SEQ ID NO: 256 - RNA, 20 nt, synthetic construct
  misc_feature 1..20: note = Description of Artificial Sequence: Syntheticoligonucleotide
  source 1..20: mol_type = other RNA
tccaacacatcggagagctt

SEQ ID NO: 257 - RNA, 20 nt, synthetic construct
  misc_feature 1..20: note = Description of Artificial Sequence: Syntheticoligonucleotide
  source 1..20: mol_type = other RNA
gcacgaagctctccgatgtg

SEQ ID NO: 258 - RNA, 20 nt, synthetic construct
  misc_feature 1..20: note = Description of Artificial Sequence: Syntheticoligonucleotide
  source 1..20: mol_type = other RNA
agcacgaagctctccgatgt

SEQ ID NO: 259 - RNA, 20 nt, synthetic construct
  misc_feature 1..20: note = Description of Artificial Sequence: Syntheticoligonucleotide
  source 1..20: mol_type = other RNA
gtgctaaactggtaccgcat

SEQ ID NO: 260 - RNA, 20 nt, synthetic construct
  misc_feature 1..20: note = Description of Artificial Sequence: Syntheticoligonucleotide
  source 1..20: mol_type = other RNA
ctggggctcatgcggtacca

SEQ ID NO: 261 - RNA, 20 nt, synthetic construct
  misc_feature 1..20: note = Description of Artificial Sequence: Syntheticoligonucleotide
  source 1..20: mol_type = other RNA
tccgtctggttgctggggct

SEQ ID NO: 262 - RNA, 20 nt, synthetic construct
  misc_feature 1..20: note = Description of Artificial Sequence: Syntheticoligonucleotide
  source 1..20: mol_type = other RNA
cccgaggaccgcagccagcc

SEQ ID NO: 263 - RNA, 20 nt, synthetic construct
  misc_feature 1..20: note = Description of Artificial Sequence: Syntheticoligonucleotide
  source 1..20: mol_type = other RNA
tgtgacacggaagcggcagt

SEQ ID NO: 264 - RNA, 20 nt, synthetic construct
  misc_feature 1..20: note = Description of Artificial Sequence: Syntheticoligonucleotide
  source 1..20: mol_type = other RNA
cgtgtcacacaactgcccaa

SEQ ID NO: 265 - RNA, 20 nt, synthetic construct
  misc_feature 1..20: note = Description of Artificial Sequence: Syntheticoligonucleotide
  source 1..20: mol_type = other RNA
ggcagttgtgtgacacggaa

SEQ ID NO: 266 - RNA, 20 nt, synthetic construct
  misc_feature 1..20: note = Description of Artificial Sequence: Syntheticoligonucleotide
  source 1..20: mol_type = other RNA
cacatgagcgtggtcagggc

SEQ ID NO: 267 - RNA, 20 nt, synthetic construct
  misc_feature 1..20: note = Description of Artificial Sequence: Syntheticoligonucleotide
  source 1..20: mol_type = other RNA
cgccgggccctgaccacgct

SEQ ID NO: 268 - RNA, 20 nt, synthetic construct
  misc_feature 1..20: note = Description of Artificial Sequence: Syntheticoligonucleotide
  source 1..20: mol_type = other RNA
ggggccagggagatggcccc

SEQ ID NO: 269 - RNA, 20 nt, synthetic construct
  misc_feature 1..20: note = Description of Artificial Sequence: Syntheticoligonucleotide
  source 1..20: mol_type = other RNA
atctgcgccttgggggccag

SEQ ID NO: 270 - RNA, 20 nt, synthetic construct
  misc_feature 1..20: note = Description of Artificial Sequence: Syntheticoligonucleotide
  source 1..20: mol_type = other RNA
gatctgcgccttgggggcca

SEQ ID NO: 271 - RNA, 20 nt, synthetic construct
  misc_feature 1..20: note = Description of Artificial Sequence: Syntheticoligonucleotide
  source 1..20: mol_type = other RNA
ccagacaggccctggaaccc

SEQ ID NO: 272 - RNA, 20 nt, synthetic construct
  misc_feature 1..20: note = Description of Artificial Sequence: Syntheticoligonucleotide
  source 1..20: mol_type = other RNA
ccagccctgctcgtggtgac

SEQ ID NO: 273 - RNA, 20 nt, synthetic construct
  misc_feature 1..20: note = Description of Artificial Sequence: Syntheticoligonucleotide
  source 1..20: mol_type = other RNA
tctctggaagggcacaaagg

SEQ ID NO: 274 - RNA, 20 nt, synthetic construct
  misc_feature 1..20: note = Description of Artificial Sequence: Syntheticoligonucleotide
  source 1..20: mol_type = other RNA
gtgcccttccagagagaagg

SEQ ID NO: 275 - RNA, 20 nt, synthetic construct
  misc_feature 1..20: note = Description of Artificial Sequence: Syntheticoligonucleotide
  source 1..20: mol_type = other RNA
tgcccttccagagagaaggg

SEQ ID NO: 276 - RNA, 20 nt, synthetic construct
  misc_feature 1..20: note = Description of Artificial Sequence: Syntheticoligonucleotide
  source 1..20: mol_type = other RNA
tgcccttctctctggaaggg

SEQ ID NO: 277 - RNA, 20 nt, synthetic construct
  misc_feature 1..20: note = Description of Artificial Sequence: Syntheticoligonucleotide
  source 1..20: mol_type = other RNA
cagagagaagggcagaagtg

SEQ ID NO: 278 - RNA, 20 nt, synthetic construct
  misc_feature 1..20: note = Description of Artificial Sequence: Syntheticoligonucleotide
  source 1..20: mol_type = other RNA
gaactggccggctggcctgg

SEQ ID NO: 279 - RNA, 20 nt, synthetic construct
  misc_feature 1..20: note = Description of Artificial Sequence: Syntheticoligonucleotide
  source 1..20: mol_type = other RNA
ggaactggccggctggcctg

SEQ ID NO: 280 - RNA, 20 nt, synthetic construct
  misc_feature 1..20: note = Description of Artificial Sequence: Syntheticoligonucleotide
  source 1..20: mol_type = other RNA
caaaccctggtggttggtgt

SEQ ID NO: 281 - RNA, 20 nt, synthetic construct
  misc_feature 1..20: note = Description of Artificial Sequence: Syntheticoligonucleotide
  source 1..20: mol_type = other RNA
gtgtcgtgggcggcctgctg

SEQ ID NO: 282 - RNA, 20 nt, synthetic construct
  misc_feature 1..20: note = Description of Artificial Sequence: Syntheticoligonucleotide
  source 1..20: mol_type = other RNA
cctcgtgcggcccgggagca

SEQ ID NO: 283 - RNA, 20 nt, synthetic construct
  misc_feature 1..20: note = Description of Artificial Sequence: Syntheticoligonucleotide
  source 1..20: mol_type = other RNA
tccctgcagagaaacacact

SEQ ID NO: 284 - RNA, 20 nt, synthetic construct
  misc_feature 1..20: note = Description of Artificial Sequence: Syntheticoligonucleotide
  source 1..20: mol_type = other RNA
ctctgcagggacaataggag

SEQ ID NO: 285 - RNA, 20 nt, synthetic construct
  misc_feature 1..20: note = Description of Artificial Sequence: Syntheticoligonucleotide
  source 1..20: mol_type = other RNA
tctgcagggacaataggagc

SEQ ID NO: 286 - RNA, 20 nt, synthetic construct
  misc_feature 1..20: note = Description of Artificial Sequence: Syntheticoligonucleotide
  source 1..20: mol_type = other RNA
ctcctcaaagaaggaggacc

SEQ ID NO: 287 - RNA, 20 nt, synthetic construct
  misc_feature 1..20: note = Description of Artificial Sequence: Syntheticoligonucleotide
  source 1..20: mol_type = other RNA
tcctcaaagaaggaggaccc

SEQ ID NO: 288 - RNA, 20 nt, synthetic construct
  misc_feature 1..20: note = Description of Artificial Sequence: Syntheticoligonucleotide
  source 1..20: mol_type = other RNA
tctgtggactatggggagct

SEQ ID NO: 289 - RNA, 20 nt, synthetic construct
  misc_feature 1..20: note = Description of Artificial Sequence: Syntheticoligonucleotide
  source 1..20: mol_type = other RNA
tctcgccactggaaatccag

SEQ ID NO: 290 - RNA, 20 nt, synthetic construct
  misc_feature 1..20: note = Description of Artificial Sequence: Syntheticoligonucleotide
  source 1..20: mol_type = other RNA
ccagtggcgagagaagaccc

SEQ ID NO: 291 - RNA, 20 nt, synthetic construct
  misc_feature 1..20: note = Description of Artificial Sequence: Syntheticoligonucleotide
  source 1..20: mol_type = other RNA
cagtggcgagagaagacccc

SEQ ID NO: 292 - RNA, 20 nt, synthetic construct
  misc_feature 1..20: note = Description of Artificial Sequence: Syntheticoligonucleotide
  source 1..20: mol_type = other RNA
cgctaggaaagacaatggtg

SEQ ID NO: 293 - RNA, 20 nt, synthetic construct
  misc_feature 1..20: note = Description of Artificial Sequence: Syntheticoligonucleotide
  source 1..20: mol_type = other RNA
tctttcctagcggaatgggc

SEQ ID NO: 294 - RNA, 20 nt, synthetic construct
  misc_feature 1..20: note = Description of Artificial Sequence: Syntheticoligonucleotide
  source 1..20: mol_type = other RNA
cctagcggaatgggcacctc

SEQ ID NO: 295 - RNA, 20 nt, synthetic construct
  misc_feature 1..20: note = Description of Artificial Sequence: Syntheticoligonucleotide
  source 1..20: mol_type = other RNA
ctagcggaatgggcacctca

SEQ ID NO: 296 - RNA, 20 nt, synthetic construct
  misc_feature 1..20: note = Description of Artificial Sequence: Syntheticoligonucleotide
  source 1..20: mol_type = other RNA
gcccctctgaccggcttcct

SEQ ID NO: 297 - RNA, 20 nt, synthetic construct
  misc_feature 1..20: note = Description of Artificial Sequence: Syntheticoligonucleotide
  source 1..20: mol_type = other RNA
cttggccaccagtgttctgc

SEQ ID NO: 298 - RNA, 20 nt, synthetic construct
  misc_feature 1..20: note = Description of Artificial Sequence: Syntheticoligonucleotide
  source 1..20: mol_type = other RNA
gccaccagtgttctgcagac

SEQ ID NO: 299 - RNA, 20 nt, synthetic construct
  misc_feature 1..20: note = Description of Artificial Sequence: Syntheticoligonucleotide
  source 1..20: mol_type = other RNA
tgcagaccctccaccatgag

SEQ ID NO: 300 - RNA, 20 nt, synthetic construct
  misc_feature 1..20: note = Description of Artificial Sequence: Syntheticoligonucleotide
  source 1..20: mol_type = other RNA
tcctgaggaaatgcgctgac

SEQ ID NO: 301 - RNA, 20 nt, synthetic construct
  misc_feature 1..20: note = Description of Artificial Sequence: Syntheticoligonucleotide
  source 1..20: mol_type = other RNA
cctcaggagaagcaggcagg

SEQ ID NO: 302 - RNA, 20 nt, synthetic construct
  misc_feature 1..20: note = Description of Artificial Sequence: Syntheticoligonucleotide
  source 1..20: mol_type = other RNA
ctcaggagaagcaggcaggg

SEQ ID NO: 303 - RNA, 20 nt, synthetic construct
  misc_feature 1..20: note = Description of Artificial Sequence: Syntheticoligonucleotide
  source 1..20: mol_type = other RNA
caggccgtccaggggctgag

SEQ ID NO: 304 - RNA, 20 nt, synthetic construct
  misc_feature 1..20: note = Description of Artificial Sequence: Syntheticoligonucleotide
  source 1..20: mol_type = other RNA
agacatgagtcctgtggtgg

SEQ ID NO: 305 - RNA, 20 nt, synthetic construct
  misc_feature 1..20: note = Description of Artificial Sequence: Syntheticoligonucleotide
  source 1..20: mol_type = other RNA
aggtcctgccagcacagagc

SEQ ID NO: 306 - RNA, 20 nt, synthetic construct
  misc_feature 1..20: note = Description of Artificial Sequence: Syntheticoligonucleotide
  source 1..20: mol_type = other RNA
agggagctggacgcaggcag

SEQ ID NO: 307 - RNA, 20 nt, synthetic construct
  misc_feature 1..20: note = Description of Artificial Sequence: Syntheticoligonucleotide
  source 1..20: mol_type = other RNA
agccccgggccgcaggcagc

SEQ ID NO: 308 - RNA, 20 nt, synthetic construct
  misc_feature 1..20: note = Description of Artificial Sequence: Syntheticoligonucleotide
  source 1..20: mol_type = other RNA
aggcaggaggctccggggcg

SEQ ID NO: 309 - RNA, 20 nt, synthetic construct
  misc_feature 1..20: note = Description of Artificial Sequence: Syntheticoligonucleotide
  source 1..20: mol_type = other RNA
ggggctggttggagatggcc

SEQ ID NO: 310 - RNA, 20 nt, synthetic construct
  misc_feature 1..20: note = Description of Artificial Sequence: Syntheticoligonucleotide
  source 1..20: mol_type = other RNA
gagatggccttggagcagcc

SEQ ID NO: 311 - RNA, 20 nt, synthetic construct
  misc_feature 1..20: note = Description of Artificial Sequence: Syntheticoligonucleotide
  source 1..20: mol_type = other RNA
gctgctccaaggccatctcc

SEQ ID NO: 312 - RNA, 20 nt, synthetic construct
  misc_feature 1..20: note = Description of Artificial Sequence: Syntheticoligonucleotide
  source 1..20: mol_type = other RNA
gagcagccaaggtgcccctg

SEQ ID NO: 313 - RNA, 20 nt, synthetic construct
  misc_feature 1..20: note = Description of Artificial Sequence: Syntheticoligonucleotide
  source 1..20: mol_type = other RNA
gggatgccactgccaggggc

SEQ ID NO: 314 - RNA, 20 nt, synthetic construct
  misc_feature 1..20: note = Description of Artificial Sequence: Syntheticoligonucleotide
  source 1..20: mol_type = other RNA
cgggatgccactgccagggg

SEQ ID NO: 315 - RNA, 20 nt, synthetic construct
  misc_feature 1..20: note = Description of Artificial Sequence: Syntheticoligonucleotide
  source 1..20: mol_type = other RNA
ggccctgcgtccagggcgtt

SEQ ID NO: 316 - RNA, 20 nt, synthetic construct
  misc_feature 1..20: note = Description of Artificial Sequence: Syntheticoligonucleotide
  source 1..20: mol_type = other RNA
tctgctccctgcaggcctag

SEQ ID NO: 317 - RNA, 20 nt, synthetic construct
  misc_feature 1..20: note = Description of Artificial Sequence: Syntheticoligonucleotide
  source 1..20: mol_type = other RNA
tctaggcctgcagggagcag

SEQ ID NO: 318 - RNA, 20 nt, synthetic construct
  misc_feature 1..20: note = Description of Artificial Sequence: Syntheticoligonucleotide
  source 1..20: mol_type = other RNA
cctgaaacttctctaggcct

SEQ ID NO: 319 - RNA, 20 nt, synthetic construct
  misc_feature 1..20: note = Description of Artificial Sequence: Syntheticoligonucleotide
  source 1..20: mol_type = other RNA
tgaccttccctgaaacttct

SEQ ID NO: 320 - RNA, 20 nt, synthetic construct
  misc_feature 1..20: note = Description of Artificial Sequence: Syntheticoligonucleotide
  source 1..20: mol_type = other RNA
cagggaaggtcagaagagct

SEQ ID NO: 321 - RNA, 20 nt, synthetic construct
  misc_feature 1..20: note = Description of Artificial Sequence: Syntheticoligonucleotide
  source 1..20: mol_type = other RNA
agggaaggtcagaagagctc

SEQ ID NO: 322 - RNA, 20 nt, synthetic construct
  misc_feature 1..20: note = Description of Artificial Sequence: Syntheticoligonucleotide
  source 1..20: mol_type = other RNA
ctgccctgcccaccacagcc

SEQ ID NO: 323 - RNA, 20 nt, synthetic construct
  misc_feature 1..20: note = Description of Artificial Sequence: Syntheticoligonucleotide
  source 1..20: mol_type = other RNA
cctgccctgcccaccacagc

SEQ ID NO: 324 - RNA, 20 nt, synthetic construct
  misc_feature 1..20: note = Description of Artificial Sequence: Syntheticoligonucleotide
  source 1..20: mol_type = other RNA
acacatgcccaggcagcacc

SEQ ID NO: 325 - RNA, 20 nt, synthetic construct
  misc_feature 1..20: note = Description of Artificial Sequence: Syntheticoligonucleotide
  source 1..20: mol_type = other RNA
cacatgcccaggcagcacct

SEQ ID NO: 326 - RNA, 20 nt, synthetic construct
  misc_feature 1..20: note = Description of Artificial Sequence: Syntheticoligonucleotide
  source 1..20: mol_type = other RNA
cctgccccacaaagggcctg

SEQ ID NO: 327 - RNA, 20 nt, synthetic construct
  misc_feature 1..20: note = Description of Artificial Sequence: Syntheticoligonucleotide
  source 1..20: mol_type = other RNA
gtggggcagggaagctgagg

SEQ ID NO: 328 - RNA, 20 nt, synthetic construct
  misc_feature 1..20: note = Description of Artificial Sequence: Syntheticoligonucleotide
  source 1..20: mol_type = other RNA
tggggcagggaagctgaggc

SEQ ID NO: 329 - RNA, 20 nt, synthetic construct
  misc_feature 1..20: note = Description of Artificial Sequence: Syntheticoligonucleotide
  source 1..20: mol_type = other RNA
ctgcctcagcttccctgccc

SEQ ID NO: 330 - RNA, 20 nt, synthetic construct
  misc_feature 1..20: note = Description of Artificial Sequence: Syntheticoligonucleotide
  source 1..20: mol_type = other RNA
caggcccagccagcactctg

SEQ ID NO: 331 - RNA, 20 nt, synthetic construct
  misc_feature 1..20: note = Description of Artificial Sequence: Syntheticoligonucleotide
  source 1..20: mol_type = other RNA
aggcccagccagcactctgg

SEQ ID NO: 332 - RNA, 20 nt, synthetic construct
  misc_feature 1..20: note = Description of Artificial Sequence: Syntheticoligonucleotide
  source 1..20: mol_type = other RNA
caccccagcccctcacacca

SEQ ID NO: 333 - RNA, 20 nt, synthetic construct
  misc_feature 1..20: note = Description of Artificial Sequence: Syntheticoligonucleotide
  source 1..20: mol_type = other RNA
ggaccgtaggatgtccctct

SEQ ID NO: 334 - DNA, 20 bp, synthetic construct
  misc_feature 1..20: note = Description of Artificial Sequence: Syntheticoligonucleotide
  source 1..20: mol_type = other DNA
ctacacaatgcgttgcctgg

SEQ ID NO: 335 - DNA, 20 bp, synthetic construct
  misc_feature 1..20: note = Description of Artificial Sequence: Syntheticoligonucleotide
  source 1..20: mol_type = other DNA
gggctctgacaggtaggacc

SEQ ID NO: 336 - DNA, 20 bp, synthetic construct
  misc_feature 1..20: note = Description of Artificial Sequence: Syntheticoligonucleotide
  source 1..20: mol_type = other DNA
tgtaggaatcccagccaggc

SEQ ID NO: 337 - DNA, 20 bp, synthetic construct
  misc_feature 1..20: note = Description of Artificial Sequence: Syntheticoligonucleotide
  source 1..20: mol_type = other DNA
cctggctccacgccctgctg

SEQ ID NO: 338 - DNA, 20 bp, synthetic construct
  misc_feature 1..20: note = Description of Artificial Sequence: Syntheticoligonucleotide
  source 1..20: mol_type = other DNA
gggaagctgagggcacgagg

SEQ ID NO: 339 - DNA, 20 bp, synthetic construct
  misc_feature 1..20: note = Description of Artificial Sequence: Syntheticoligonucleotide
  source 1..20: mol_type = other DNA
acagcgatgctgaccccctg

SEQ ID NO: 340 - DNA, 20 bp, synthetic construct
  misc_feature 1..20: note = Description of Artificial Sequence: Syntheticoligonucleotide
  source 1..20: mol_type = other DNA
ttaacagcgatgctgacccc

SEQ ID NO: 341 - DNA, 20 bp, synthetic construct
  misc_feature 1..20: note = Description of Artificial Sequence: Syntheticoligonucleotide
  source 1..20: mol_type = other DNA
tatgaccagatggacctggc

SEQ ID NO: 342 - DNA, 20 bp, synthetic construct
  misc_feature 1..20: note = Description of Artificial Sequence: Syntheticoligonucleotide
  source 1..20: mol_type = other DNA
gggcccctagaaggtggcta

SEQ ID NO: 343 - DNA, 20 bp, synthetic construct
  misc_feature 1..20: note = Description of Artificial Sequence: Syntheticoligonucleotide
  source 1..20: mol_type = other DNA
taggggccccaactccatgg

SEQ ID NO: 344 - DNA, 20 bp, synthetic construct
  misc_feature 1..20: note = Description of Artificial Sequence: Syntheticoligonucleotide
  source 1..20: mol_type = other DNA
agaagctccaggtagccacc

SEQ ID NO: 345 - DNA, 20 bp, synthetic construct
  misc_feature 1..20: note = Description of Artificial Sequence: Syntheticoligonucleotide
  source 1..20: mol_type = other DNA
tccagccaggtccatctggt

SEQ ID NO: 346 - DNA, 20 bp, synthetic construct
  misc_feature 1..20: note = Description of Artificial Sequence: Syntheticoligonucleotide
  source 1..20: mol_type = other DNA
ttctccagccaggtccatct

SEQ ID NO: 347 - RNA, 20 nt, synthetic construct
  misc_feature 1..20: note = Description of Artificial Sequence: Syntheticoligonucleotide
  source 1..20: mol_type = other RNA
ccgctgttgccgccgctgct

SEQ ID NO: 348 - RNA, 20 nt, synthetic construct
  misc_feature 1..20: note = Description of Artificial Sequence: Syntheticoligonucleotide
  source 1..20: mol_type = other RNA
ccgccgctgctgctgctgtt

SEQ ID NO: 349 - RNA, 20 nt, synthetic construct
  misc_feature 1..20: note = Description of Artificial Sequence: Syntheticoligonucleotide
  source 1..20: mol_type = other RNA
ctgctactgtgccccaccgg

SEQ ID NO: 350 - RNA, 20 nt, synthetic construct
  misc_feature 1..20: note = Description of Artificial Sequence: Syntheticoligonucleotide
  source 1..20: mol_type = other RNA
ataatctccatcctcgtcct

SEQ ID NO: 351 - RNA, 20 nt, synthetic construct
  misc_feature 1..20: note = Description of Artificial Sequence: Syntheticoligonucleotide
  source 1..20: mol_type = other RNA
tgaagagctgatgctcgccc

SEQ ID NO: 352 - RNA, 20 nt, synthetic construct
  misc_feature 1..20: note = Description of Artificial Sequence: Syntheticoligonucleotide
  source 1..20: mol_type = other RNA
gagcaacggcggaaggtggc

SEQ ID NO: 353 - RNA, 20 nt, synthetic construct
  misc_feature 1..20: note = Description of Artificial Sequence: Syntheticoligonucleotide
  source 1..20: mol_type = other RNA
ctggcagcctccaggcctcc

SEQ ID NO: 354 - RNA, 20 nt, synthetic construct
  misc_feature 1..20: note = Description of Artificial Sequence: Syntheticoligonucleotide
  source 1..20: mol_type = other RNA
tggtgctgatggaggagacc

SEQ ID NO: 355 - RNA, 20 nt, synthetic construct
  misc_feature 1..20: note = Description of Artificial Sequence: Syntheticoligonucleotide
  source 1..20: mol_type = other RNA
aatctgtagcctctgggtct

SEQ ID NO: 356 - RNA, 20 nt, synthetic construct
  misc_feature 1..20: note = Description of Artificial Sequence: Syntheticoligonucleotide
  source 1..20: mol_type = other RNA
ttcaatctgtagcctctggg

SEQ ID NO: 357 - RNA, 20 nt, synthetic construct
  misc_feature 1..20: note = Description of Artificial Sequence: Syntheticoligonucleotide
  source 1..20: mol_type = other RNA
gttcaatctgtagcctctgg

SEQ ID NO: 358 - RNA, 20 nt, synthetic construct
  misc_feature 1..20: note = Description of Artificial Sequence: Syntheticoligonucleotide
  source 1..20: mol_type = other RNA
aacaaactgcccaccgcctg

SEQ ID NO: 359 - RNA, 20 nt, synthetic construct
  misc_feature 1..20: note = Description of Artificial Sequence: Syntheticoligonucleotide
  source 1..20: mol_type = other RNA
atgacatagccccggcgggc

SEQ ID NO: 360 - RNA, 20 nt, synthetic construct
  misc_feature 1..20: note = Description of Artificial Sequence: Syntheticoligonucleotide
  source 1..20: mol_type = other RNA
tacatatcttttatgacctc

SEQ ID NO: 361 - RNA, 20 nt, synthetic construct
  misc_feature 1..20: note = Description of Artificial Sequence: Syntheticoligonucleotide
  source 1..20: mol_type = other RNA
tatgacctcttccctggctt

SEQ ID NO: 362 - RNA, 20 nt, synthetic construct
  misc_feature 1..20: note = Description of Artificial Sequence: Syntheticoligonucleotide
  source 1..20: mol_type = other RNA
atgacctcttccctggcttc

SEQ ID NO: 363 - RNA, 20 nt, synthetic construct
  misc_feature 1..20: note = Description of Artificial Sequence: Syntheticoligonucleotide
  source 1..20: mol_type = other RNA
tgacctcttccctggcttct

SEQ ID NO: 364 - RNA, 20 nt, synthetic construct
  misc_feature 1..20: note = Description of Artificial Sequence: Syntheticoligonucleotide
  source 1..20: mol_type = other RNA
accaagaagccagggaagag

SEQ ID NO: 365 - RNA, 20 nt, synthetic construct
  misc_feature 1..20: note = Description of Artificial Sequence: Syntheticoligonucleotide
  source 1..20: mol_type = other RNA
cctggcttcttggtgaagat

SEQ ID NO: 366 - RNA, 20 nt, synthetic construct
  misc_feature 1..20: note = Description of Artificial Sequence: Syntheticoligonucleotide
  source 1..20: mol_type = other RNA
ttggtgaagatgagcagtga

SEQ ID NO: 367 - RNA, 20 nt, synthetic construct
  misc_feature 1..20: note = Description of Artificial Sequence: Syntheticoligonucleotide
  source 1..20: mol_type = other RNA
gtgaagatgagcagtgacct

SEQ ID NO: 368 - RNA, 20 nt, synthetic construct
  misc_feature 1..20: note = Description of Artificial Sequence: Syntheticoligonucleotide
  source 1..20: mol_type = other RNA
ccccatgtggagtacattga

SEQ ID NO: 369 - RNA, 20 nt, synthetic construct
  misc_feature 1..20: note = Description of Artificial Sequence: Syntheticoligonucleotide
  source 1..20: mol_type = other RNA
ctcaatgtactccacatggg

SEQ ID NO: 370 - RNA, 20 nt, synthetic construct
  misc_feature 1..20: note = Description of Artificial Sequence: Syntheticoligonucleotide
  source 1..20: mol_type = other RNA
aggaagactcctttgtcttc

SEQ ID NO: 371 - RNA, 20 nt, synthetic construct
  misc_feature 1..20: note = Description of Artificial Sequence: Syntheticoligonucleotide
  source 1..20: mol_type = other RNA
gtcttcgcccagagcatccc

SEQ ID NO: 372 - RNA, 20 nt, synthetic construct
  misc_feature 1..20: note = Description of Artificial Sequence: Syntheticoligonucleotide
  source 1..20: mol_type = other RNA
tcttcgcccagagcatccca

SEQ ID NO: 373 - RNA, 20 nt, synthetic construct
  misc_feature 1..20: note = Description of Artificial Sequence: Syntheticoligonucleotide
  source 1..20: mol_type = other RNA
gcccagagcatcccatggaa

SEQ ID NO: 374 - RNA, 20 nt, synthetic construct
  misc_feature 1..20: note = Description of Artificial Sequence: Syntheticoligonucleotide
  source 1..20: mol_type = other RNA
catgggatgctctgggcgaa

SEQ ID NO: 375 - RNA, 20 nt, synthetic construct
  misc_feature 1..20: note = Description of Artificial Sequence: Syntheticoligonucleotide
  source 1..20: mol_type = other RNA
gctccaggttccatgggatg

SEQ ID NO: 376 - RNA, 20 nt, synthetic construct
  misc_feature 1..20: note = Description of Artificial Sequence: Syntheticoligonucleotide
  source 1..20: mol_type = other RNA
tcccagcatggcaccagaca

SEQ ID NO: 377 - RNA, 20 nt, synthetic construct
  misc_feature 1..20: note = Description of Artificial Sequence: Syntheticoligonucleotide
  source 1..20: mol_type = other RNA
ctctgtctggtgccatgctg

SEQ ID NO: 378 - RNA, 20 nt, synthetic construct
  misc_feature 1..20: note = Description of Artificial Sequence: Syntheticoligonucleotide
  source 1..20: mol_type = other RNA
gataccagcatccagggtgc

SEQ ID NO: 379 - RNA, 20 nt, synthetic construct
  misc_feature 1..20: note = Description of Artificial Sequence: Syntheticoligonucleotide
  source 1..20: mol_type = other RNA
agggcagggtcaccatcacc

SEQ ID NO: 380 - RNA, 20 nt, synthetic construct
  misc_feature 1..20: note = Description of Artificial Sequence: Syntheticoligonucleotide
  source 1..20: mol_type = other RNA
aagtcggtgatggtgaccct

SEQ ID NO: 381 - RNA, 20 nt, synthetic construct
  misc_feature 1..20: note = Description of Artificial Sequence: Syntheticoligonucleotide
  source 1..20: mol_type = other RNA
aacagcgtgccggaggagga

SEQ ID NO: 382 - RNA, 20 nt, synthetic construct
  misc_feature 1..20: note = Description of Artificial Sequence: Syntheticoligonucleotide
  source 1..20: mol_type = other RNA
gccacaccagcatcccggcc

SEQ ID NO: 383 - RNA, 20 nt, synthetic construct
  misc_feature 1..20: note = Description of Artificial Sequence: Syntheticoligonucleotide
  source 1..20: mol_type = other RNA
agcacacgcaggctgtgcag

SEQ ID NO: 384 - RNA, 20 nt, synthetic construct
  misc_feature 1..20: note = Description of Artificial Sequence: Syntheticoligonucleotide
  source 1..20: mol_type = other RNA
acagttgagcacacgcaggc

SEQ ID NO: 385 - RNA, 20 nt, synthetic construct
  misc_feature 1..20: note = Description of Artificial Sequence: Syntheticoligonucleotide
  source 1..20: mol_type = other RNA
ccttgacagttgagcacacg

SEQ ID NO: 386 - RNA, 20 nt, synthetic construct
  misc_feature 1..20: note = Description of Artificial Sequence: Syntheticoligonucleotide
  source 1..20: mol_type = other RNA
gctgactcttccgaataaac

SEQ ID NO: 387 - RNA, 20 nt, synthetic construct
  misc_feature 1..20: note = Description of Artificial Sequence: Syntheticoligonucleotide
  source 1..20: mol_type = other RNA
attcggaagagtcagctaat

SEQ ID NO: 388 - RNA, 20 nt, synthetic construct
  misc_feature 1..20: note = Description of Artificial Sequence: Syntheticoligonucleotide
  source 1..20: mol_type = other RNA
ttcggaagagtcagctaatc

SEQ ID NO: 389 - RNA, 20 nt, synthetic construct
  misc_feature 1..20: note = Description of Artificial Sequence: Syntheticoligonucleotide
  source 1..20: mol_type = other RNA
ggaagagtcagctaatccag

SEQ ID NO: 390 - RNA, 20 nt, synthetic construct
  misc_feature 1..20: note = Description of Artificial Sequence: Syntheticoligonucleotide
  source 1..20: mol_type = other RNA
tgctgcccctggccggtggg

SEQ ID NO: 391 - RNA, 20 nt, synthetic construct
  misc_feature 1..20: note = Description of Artificial Sequence: Syntheticoligonucleotide
  source 1..20: mol_type = other RNA
aggatgcggctatacccacc

SEQ ID NO: 392 - RNA, 20 nt, synthetic construct
  misc_feature 1..20: note = Description of Artificial Sequence: Syntheticoligonucleotide
  source 1..20: mol_type = other RNA
ccagctgctgcaaccagcac

SEQ ID NO: 393 - RNA, 20 nt, synthetic construct
  misc_feature 1..20: note = Description of Artificial Sequence: Syntheticoligonucleotide
  source 1..20: mol_type = other RNA
cagcagctgggaacttccgg

SEQ ID NO: 394 - RNA, 20 nt, synthetic construct
  misc_feature 1..20: note = Description of Artificial Sequence: Syntheticoligonucleotide
  source 1..20: mol_type = other RNA
cgggacgacgcctgcctcta

SEQ ID NO: 395 - RNA, 20 nt, synthetic construct
  misc_feature 1..20: note = Description of Artificial Sequence: Syntheticoligonucleotide
  source 1..20: mol_type = other RNA
gtggccccgactgtgatgac

SEQ ID NO: 396 - RNA, 20 nt, synthetic construct
  misc_feature 1..20: note = Description of Artificial Sequence: Syntheticoligonucleotide
  source 1..20: mol_type = other RNA
ccttggggactttggggact

SEQ ID NO: 397 - RNA, 20 nt, synthetic construct
  misc_feature 1..20: note = Description of Artificial Sequence: Syntheticoligonucleotide
  source 1..20: mol_type = other RNA
gtccccaaagtccccaaggt

SEQ ID NO: 398 - RNA, 20 nt, synthetic construct
  misc_feature 1..20: note = Description of Artificial Sequence: Syntheticoligonucleotide
  source 1..20: mol_type = other RNA
gggactttggggactaattt

SEQ ID NO: 399 - RNA, 20 nt, synthetic construct
  misc_feature 1..20: note = Description of Artificial Sequence: Syntheticoligonucleotide
  source 1..20: mol_type = other RNA
ggggactaattttggacgct

SEQ ID NO: 400 - RNA, 20 nt, synthetic construct
  misc_feature 1..20: note = Description of Artificial Sequence: Syntheticoligonucleotide
  source 1..20: mol_type = other RNA
gggactaattttggacgctg

SEQ ID NO: 401 - RNA, 20 nt, synthetic construct
  misc_feature 1..20: note = Description of Artificial Sequence: Syntheticoligonucleotide
  source 1..20: mol_type = other RNA
tggacgctgtgtggatctct

SEQ ID NO: 402 - RNA, 20 nt, synthetic construct
  misc_feature 1..20: note = Description of Artificial Sequence: Syntheticoligonucleotide
  source 1..20: mol_type = other RNA
ggacgctgtgtggatctctt

SEQ ID NO: 403 - RNA, 20 nt, synthetic construct
  misc_feature 1..20: note = Description of Artificial Sequence: Syntheticoligonucleotide
  source 1..20: mol_type = other RNA
gacgctgtgtggatctcttt

SEQ ID NO: 404 - RNA, 20 nt, synthetic construct
  misc_feature 1..20: note = Description of Artificial Sequence: Syntheticoligonucleotide
  source 1..20: mol_type = other RNA
ccgggggcaaagagatccac

SEQ ID NO: 405 - RNA, 20 nt, synthetic construct
  misc_feature 1..20: note = Description of Artificial Sequence: Syntheticoligonucleotide
  source 1..20: mol_type = other RNA
gcccccgggaaggacatcat

SEQ ID NO: 406 - RNA, 20 nt, synthetic construct
  misc_feature 1..20: note = Description of Artificial Sequence: Syntheticoligonucleotide
  source 1..20: mol_type = other RNA
cccccgggaaggacatcatc

SEQ ID NO: 407 - RNA, 20 nt, synthetic construct
  misc_feature 1..20: note = Description of Artificial Sequence: Syntheticoligonucleotide
  source 1..20: mol_type = other RNA
atgtcacagagtgggacctc

SEQ ID NO: 408 - RNA, 20 nt, synthetic construct
  misc_feature 1..20: note = Description of Artificial Sequence: Syntheticoligonucleotide
  source 1..20: mol_type = other RNA
tggctcggatgctgagccgg

SEQ ID NO: 409 - RNA, 20 nt, synthetic construct
  misc_feature 1..20: note = Description of Artificial Sequence: Syntheticoligonucleotide
  source 1..20: mol_type = other RNA
ccctggccgagctgcggcag

SEQ ID NO: 410 - RNA, 20 nt, synthetic construct
  misc_feature 1..20: note = Description of Artificial Sequence: Syntheticoligonucleotide
  source 1..20: mol_type = other RNA
gtagagaagtggatcagcct

SEQ ID NO: 411 - RNA, 20 nt, synthetic construct
  misc_feature 1..20: note = Description of Artificial Sequence: Syntheticoligonucleotide
  source 1..20: mol_type = other RNA
ggtagagaagtggatcagcc

SEQ ID NO: 412 - RNA, 20 nt, synthetic construct
  misc_feature 1..20: note = Description of Artificial Sequence: Syntheticoligonucleotide
  source 1..20: mol_type = other RNA
tctaccaaagacgtcatcaa

SEQ ID NO: 413 - RNA, 20 nt, synthetic construct
  misc_feature 1..20: note = Description of Artificial Sequence: Syntheticoligonucleotide
  source 1..20: mol_type = other RNA
atgacgtctttggtagagaa

SEQ ID NO: 414 - RNA, 20 nt, synthetic construct
  misc_feature 1..20: note = Description of Artificial Sequence: Syntheticoligonucleotide
  source 1..20: mol_type = other RNA
cctgaggaccagcaggtgct

SEQ ID NO: 415 - RNA, 20 nt, synthetic construct
  misc_feature 1..20: note = Description of Artificial Sequence: Syntheticoligonucleotide
  source 1..20: mol_type = other RNA
ggggtcagcacctgctggtc

SEQ ID NO: 416 - RNA, 20 nt, synthetic construct
  misc_feature 1..20: note = Description of Artificial Sequence: Syntheticoligonucleotide
  source 1..20: mol_type = other RNA
gagtgggccccgagtgtgcc

SEQ ID NO: 417 - RNA, 20 nt, synthetic construct
  misc_feature 1..20: note = Description of Artificial Sequence: Syntheticoligonucleotide
  source 1..20: mol_type = other RNA
tggggcacagcgggctgtag

SEQ ID NO: 418 - RNA, 20 nt, synthetic construct
  misc_feature 1..20: note = Description of Artificial Sequence: Syntheticoligonucleotide
  source 1..20: mol_type = other RNA
tccaggagcgggaggcgtcg

SEQ ID NO: 419 - RNA, 20 nt, synthetic construct
  misc_feature 1..20: note = Description of Artificial Sequence: Syntheticoligonucleotide
  source 1..20: mol_type = other RNA
cagacctgctggcctcctat

SEQ ID NO: 420 - RNA, 20 nt, synthetic construct
  misc_feature 1..20: note = Description of Artificial Sequence: Syntheticoligonucleotide
  source 1..20: mol_type = other RNA
agggccttgcagacctgctg

SEQ ID NO: 421 - RNA, 20 nt, synthetic construct
  misc_feature 1..20: note = Description of Artificial Sequence: Syntheticoligonucleotide
  source 1..20: mol_type = other RNA
gggggtgagggtgtctatgc

SEQ ID NO: 422 - RNA, 20 nt, synthetic construct
  misc_feature 1..20: note = Description of Artificial Sequence: Syntheticoligonucleotide
  source 1..20: mol_type = other RNA
ggggtgagggtgtctatgcc

SEQ ID NO: 423 - RNA, 20 nt, synthetic construct
  misc_feature 1..20: note = Description of Artificial Sequence: Syntheticoligonucleotide
  source 1..20: mol_type = other RNA
gcacggggaaccaggcagca

SEQ ID NO: 424 - RNA, 20 nt, synthetic construct
  misc_feature 1..20: note = Description of Artificial Sequence: Syntheticoligonucleotide
  source 1..20: mol_type = other RNA
cccgtgccaactgcagcatc

SEQ ID NO: 425 - RNA, 20 nt, synthetic construct
  misc_feature 1..20: note = Description of Artificial Sequence: Syntheticoligonucleotide
  source 1..20: mol_type = other RNA
tggatgctgcagttggcacg

SEQ ID NO: 426 - RNA, 20 nt, synthetic construct
  misc_feature 1..20: note = Description of Artificial Sequence: Syntheticoligonucleotide
  source 1..20: mol_type = other RNA
tggtggcagtggacatgggt

SEQ ID NO: 427 - RNA, 20 nt, synthetic construct
  misc_feature 1..20: note = Description of Artificial Sequence: Syntheticoligonucleotide
  source 1..20: mol_type = other RNA
cacttcccaatggaagctgc

SEQ ID NO: 428 - RNA, 20 nt, synthetic construct
  misc_feature 1..20: note = Description of Artificial Sequence: Syntheticoligonucleotide
  source 1..20: mol_type = other RNA
cattgggaagtggaagacct

SEQ ID NO: 429 - RNA, 20 nt, synthetic construct
  misc_feature 1..20: note = Description of Artificial Sequence: Syntheticoligonucleotide
  source 1..20: mol_type = other RNA
ggaagtggaagaccttagtg

SEQ ID NO: 430 - RNA, 20 nt, synthetic construct
  misc_feature 1..20: note = Description of Artificial Sequence: Syntheticoligonucleotide
  source 1..20: mol_type = other RNA
gtgtccggaggcagcctgcg

SEQ ID NO: 431 - RNA, 20 nt, synthetic construct
  misc_feature 1..20: note = Description of Artificial Sequence: Syntheticoligonucleotide
  source 1..20: mol_type = other RNA
gccaccaggcggccagtgtc

SEQ ID NO: 432 - RNA, 20 nt, synthetic construct
  misc_feature 1..20: note = Description of Artificial Sequence: Syntheticoligonucleotide
  source 1..20: mol_type = other RNA
ctgctgccatgccccagggc

SEQ ID NO: 433 - RNA, 20 nt, synthetic construct
  misc_feature 1..20: note = Description of Artificial Sequence: Syntheticoligonucleotide
  source 1..20: mol_type = other RNA
cagccctggggcatggcagc

SEQ ID NO: 434 - RNA, 20 nt, synthetic construct
  misc_feature 1..20: note = Description of Artificial Sequence: Syntheticoligonucleotide
  source 1..20: mol_type = other RNA
cattccagccctggggcatg

SEQ ID NO: 435 - RNA, 20 nt, synthetic construct
  misc_feature 1..20: note = Description of Artificial Sequence: Syntheticoligonucleotide
  source 1..20: mol_type = other RNA
gcattccagccctggggcat

SEQ ID NO: 436 - RNA, 20 nt, synthetic construct
  misc_feature 1..20: note = Description of Artificial Sequence: Syntheticoligonucleotide
  source 1..20: mol_type = other RNA
tgcattccagccctggggca

SEQ ID NO: 437 - RNA, 20 nt, synthetic construct
  misc_feature 1..20: note = Description of Artificial Sequence: Syntheticoligonucleotide
  source 1..20: mol_type = other RNA
attttgcattccagccctgg

SEQ ID NO: 438 - RNA, 20 nt, synthetic construct
  misc_feature 1..20: note = Description of Artificial Sequence: Syntheticoligonucleotide
  source 1..20: mol_type = other RNA
catccagtcagggtccatcc

SEQ ID NO: 439 - RNA, 20 nt, synthetic construct
  misc_feature 1..20: note = Description of Artificial Sequence: Syntheticoligonucleotide
  source 1..20: mol_type = other RNA
tccacgctgtaggctcccag

SEQ ID NO: 440 - RNA, 20 nt, synthetic construct
  misc_feature 1..20: note = Description of Artificial Sequence: Syntheticoligonucleotide
  source 1..20: mol_type = other RNA
ccacacacaggttgtccacg

SEQ ID NO: 441 - RNA, 20 nt, synthetic construct
  misc_feature 1..20: note = Description of Artificial Sequence: Syntheticoligonucleotide
  source 1..20: mol_type = other RNA
tccactggtcctgtctgctc

SEQ ID NO: 442 - RNA, 20 nt, synthetic construct
  misc_feature 1..20: note = Description of Artificial Sequence: Syntheticoligonucleotide
  source 1..20: mol_type = other RNA
ctgaaggccggctccggcag

SEQ ID NO: 443 - DNA, 20 bp, synthetic construct
  misc_feature 1..20: note = Description of Artificial Sequence: Syntheticoligonucleotide
  source 1..20: mol_type = other DNA
gaagctatgttttccatctc

SEQ ID NO: 444 - DNA, 20 bp, synthetic construct
  misc_feature 1..20: note = Description of Artificial Sequence: Syntheticoligonucleotide
  source 1..20: mol_type = other DNA
gcaggggcagccgccccctg

SEQ ID NO: 445 - DNA, 20 bp, synthetic construct
  misc_feature 1..20: note = Description of Artificial Sequence: Syntheticoligonucleotide
  source 1..20: mol_type = other DNA
ctcctagaacccaacaggta

SEQ ID NO: 446 - DNA, 20 bp, synthetic construct
  misc_feature 1..20: note = Description of Artificial Sequence: Syntheticoligonucleotide
  source 1..20: mol_type = other DNA
gaaagacctcctctgtgtcc

SEQ ID NO: 447 - DNA, 20 bp, synthetic construct
  misc_feature 1..20: note = Description of Artificial Sequence: Syntheticoligonucleotide
  source 1..20: mol_type = other DNA
tccatctcggggttggcagg

SEQ ID NO: 448 - DNA, 20 bp, synthetic construct
  misc_feature 1..20: note = Description of Artificial Sequence: Syntheticoligonucleotide
  source 1..20: mol_type = other DNA
ttcctgatggtggagatgga

SEQ ID NO: 449 - DNA, 20 bp, synthetic construct
  misc_feature 1..20: note = Description of Artificial Sequence: Syntheticoligonucleotide
  source 1..20: mol_type = other DNA
ctgactcccagctctgaccc

SEQ ID NO: 450 - DNA, 20 bp, synthetic construct
  misc_feature 1..20: note = Description of Artificial Sequence: Syntheticoligonucleotide
  source 1..20: mol_type = other DNA
tggggtcagagctgggagtc

SEQ ID NO: 451 - DNA, 20 bp, synthetic construct
  misc_feature 1..20: note = Description of Artificial Sequence: Syntheticoligonucleotide
  source 1..20: mol_type = other DNA
gaaagacctcctctgtgtcc

SEQ ID NO: 452 - DNA, 20 bp, synthetic construct
  misc_feature 1..20: note = Description of Artificial Sequence: Syntheticoligonucleotide
  source 1..20: mol_type = other DNA
cgaagctatgttttccatct

SEQ ID NO: 453 - DNA, 20 bp, synthetic construct
  misc_feature 1..20: note = Description of Artificial Sequence: Syntheticoligonucleotide
  source 1..20: mol_type = other DNA
gaagctatgttttccatctc

SEQ ID NO: 454 - DNA, 20 bp, synthetic construct
  misc_feature 1..20: note = Description of Artificial Sequence: Syntheticoligonucleotide
  source 1..20: mol_type = other DNA
tccatctccaccatcaggaa

SEQ ID NO: 455 - DNA, 20 bp, synthetic construct
  misc_feature 1..20: note = Description of Artificial Sequence: Syntheticoligonucleotide
  source 1..20: mol_type = other DNA
ccatctccaccatcaggaac

SEQ ID NO: 456 - DNA, 20 bp, synthetic construct
  misc_feature 1..20: note = Description of Artificial Sequence: Syntheticoligonucleotide
  source 1..20: mol_type = other DNA
ctgatggtggagatggaaaa

SEQ ID NO: 457 - DNA, 20 bp, synthetic construct
  misc_feature 1..20: note = Description of Artificial Sequence: Syntheticoligonucleotide
  source 1..20: mol_type = other DNA
catctccaccatcaggaaca

SEQ ID NO: 458 - DNA, 20 bp, synthetic construct
  misc_feature 1..20: note = Description of Artificial Sequence: Syntheticoligonucleotide
  source 1..20: mol_type = other DNA
ttcctgatggtggagatgga

SEQ ID NO: 459 - DNA, 20 bp, synthetic construct
  misc_feature 1..20: note = Description of Artificial Sequence: Syntheticoligonucleotide
  source 1..20: mol_type = other DNA
gcaggggcagccgccccctg

SEQ ID NO: 460 - DNA, 20 bp, synthetic construct
  misc_feature 1..20: note = Description of Artificial Sequence: Syntheticoligonucleotide
  source 1..20: mol_type = other DNA
tccatctcggggttggcagg

SEQ ID NO: 461 - DNA, 20 bp, synthetic construct
  misc_feature 1..20: note = Description of Artificial Sequence: Syntheticoligonucleotide
  source 1..20: mol_type = other DNA
taggagcaaattgtccatct

SEQ ID NO: 462 - DNA, 20 bp, synthetic construct
  misc_feature 1..20: note = Description of Artificial Sequence: Syntheticoligonucleotide
  source 1..20: mol_type = other DNA
ggttctaggagcaaattgtc

SEQ ID NO: 463 - DNA, 20 bp, synthetic construct
  misc_feature 1..20: note = Description of Artificial Sequence: Syntheticoligonucleotide
  source 1..20: mol_type = other DNA
gctcctagaacccaacaggt

SEQ ID NO: 464 - DNA, 20 bp, synthetic construct
  misc_feature 1..20: note = Description of Artificial Sequence: Syntheticoligonucleotide
  source 1..20: mol_type = other DNA
ctcctagaacccaacaggta

SEQ ID NO: 465 - DNA, 20 bp, synthetic construct
  misc_feature 1..20: note = Description of Artificial Sequence: Syntheticoligonucleotide
  source 1..20: mol_type = other DNA
tccagacgccatctttcagg

SEQ ID NO: 466 - DNA, 20 bp, synthetic construct
  misc_feature 1..20: note = Description of Artificial Sequence: Syntheticoligonucleotide
  source 1..20: mol_type = other DNA
tggtaagagtcctcctgccc

SEQ ID NO: 467 - DNA, 20 bp, synthetic construct
  misc_feature 1..20: note = Description of Artificial Sequence: Syntheticoligonucleotide
  source 1..20: mol_type = other DNA
ttacagcatcttgggtcagg

SEQ ID NO: 468 - DNA, 20 bp, synthetic construct
  misc_feature 1..20: note = Description of Artificial Sequence: Syntheticoligonucleotide
  source 1..20: mol_type = other DNA
ggtcaggtgggccggcagct

SEQ ID NO: 469 - DNA, 20 bp, synthetic construct
  misc_feature 1..20: note = Description of Artificial Sequence: Syntheticoligonucleotide
  source 1..20: mol_type = other DNA
ctatcattggagatgacatt

SEQ ID NO: 470 - DNA, 20 bp, synthetic construct
  misc_feature 1..20: note = Description of Artificial Sequence: Syntheticoligonucleotide
  source 1..20: mol_type = other DNA
gagatgacattaaccggaga

SEQ ID NO: 471 - DNA, 20 bp, synthetic construct
  misc_feature 1..20: note = Description of Artificial Sequence: Syntheticoligonucleotide
  source 1..20: mol_type = other DNA
tggaactctgtgtcgtatct

SEQ ID NO: 472 - DNA, 20 bp, synthetic construct
  misc_feature 1..20: note = Description of Artificial Sequence: Syntheticoligonucleotide
  source 1..20: mol_type = other DNA
cagaatttactggagcagct

SEQ ID NO: 473 - DNA, 20 bp, synthetic construct
  misc_feature 1..20: note = Description of Artificial Sequence: Syntheticoligonucleotide
  source 1..20: mol_type = other DNA
actggagcagctgcagccca

SEQ ID NO: 474 - DNA, 20 bp, synthetic construct
  misc_feature 1..20: note = Description of Artificial Sequence: Syntheticoligonucleotide
  source 1..20: mol_type = other DNA
ccagctgtgggctgcagctg

SEQ ID NO: 475 - DNA, 20 bp, synthetic construct
  misc_feature 1..20: note = Description of Artificial Sequence: Syntheticoligonucleotide
  source 1..20: mol_type = other DNA
gtaggcattcccagctgtgg

SEQ ID NO: 476 - DNA, 20 bp, synthetic construct
  misc_feature 1..20: note = Description of Artificial Sequence: Syntheticoligonucleotide
  source 1..20: mol_type = other DNA
gtgaagagttcgtaggcatt

SEQ ID NO: 477 - DNA, 20 bp, synthetic construct
  misc_feature 1..20: note = Description of Artificial Sequence: Syntheticoligonucleotide
  source 1..20: mol_type = other DNA
accaagattgcctccaggta

SEQ ID NO: 478 - DNA, 20 bp, synthetic construct
  misc_feature 1..20: note = Description of Artificial Sequence: Syntheticoligonucleotide
  source 1..20: mol_type = other DNA
cctccaggtacccaccacca

SEQ ID NO: 479 - DNA, 20 bp, synthetic construct
  misc_feature 1..20: note = Description of Artificial Sequence: Syntheticoligonucleotide
  source 1..20: mol_type = other DNA
ctaatgtggatactaactcc

SEQ ID NO: 480 - DNA, 20 bp, synthetic construct
  misc_feature 1..20: note = Description of Artificial Sequence: Syntheticoligonucleotide
  source 1..20: mol_type = other DNA
ttccgtgtggcagctgacat

SEQ ID NO: 481 - DNA, 20 bp, synthetic construct
  misc_feature 1..20: note = Description of Artificial Sequence: Syntheticoligonucleotide
  source 1..20: mol_type = other DNA
ctgatggcaacttcaactgg

SEQ ID NO: 482 - DNA, 20 bp, synthetic construct
  misc_feature 1..20: note = Description of Artificial Sequence: Syntheticoligonucleotide
  source 1..20: mol_type = other DNA
tactttgctagcaaactggt

SEQ ID NO: 483 - DNA, 20 bp, synthetic construct
  misc_feature 1..20: note = Description of Artificial Sequence: Syntheticoligonucleotide
  source 1..20: mol_type = other DNA
agcaccagtttgctagcaaa

SEQ ID NO: 484 - DNA, 20 bp, synthetic construct
  misc_feature 1..20: note = Description of Artificial Sequence: Syntheticoligonucleotide
  source 1..20: mol_type = other DNA
aactggggccgggttgttgc

SEQ ID NO: 485 - DNA, 20 bp, synthetic construct
  misc_feature 1..20: note = Description of Artificial Sequence: Syntheticoligonucleotide
  source 1..20: mol_type = other DNA
ttctctttcctgtaggatga

SEQ ID NO: 486 - DNA, 20 bp, synthetic construct
  misc_feature 1..20: note = Description of Artificial Sequence: Syntheticoligonucleotide
  source 1..20: mol_type = other DNA
tctttcctgtaggatgattg

SEQ ID NO: 487 - DNA, 20 bp, synthetic construct
  misc_feature 1..20: note = Description of Artificial Sequence: Syntheticoligonucleotide
  source 1..20: mol_type = other DNA
cctgtaggatgattgctaat

SEQ ID NO: 488 - DNA, 20 bp, synthetic construct
  misc_feature 1..20: note = Description of Artificial Sequence: Syntheticoligonucleotide
  source 1..20: mol_type = other DNA
ctgtaggatgattgctaatg

SEQ ID NO: 489 - DNA, 20 bp, synthetic construct
  misc_feature 1..20: note = Description of Artificial Sequence: Syntheticoligonucleotide
  source 1..20: mol_type = other DNA
ctaatgtggatactaactcc

SEQ ID NO: 490 - DNA, 20 bp, synthetic construct
  misc_feature 1..20: note = Description of Artificial Sequence: Syntheticoligonucleotide
  source 1..20: mol_type = other DNA
ttccgtgtggcagctgacat

SEQ ID NO: 491 - DNA, 20 bp, synthetic construct
  misc_feature 1..20: note = Description of Artificial Sequence: Syntheticoligonucleotide
  source 1..20: mol_type = other DNA
cgtgtggcagctgacatgtt

SEQ ID NO: 492 - DNA, 20 bp, synthetic construct
  misc_feature 1..20: note = Description of Artificial Sequence: Syntheticoligonucleotide
  source 1..20: mol_type = other DNA
ccatcagcaaacatgtcagc

SEQ ID NO: 493 - DNA, 20 bp, synthetic construct
  misc_feature 1..20: note = Description of Artificial Sequence: Syntheticoligonucleotide
  source 1..20: mol_type = other DNA
aagttgccatcagcaaacat

SEQ ID NO: 494 - DNA, 20 bp, synthetic construct
  misc_feature 1..20: note = Description of Artificial Sequence: Syntheticoligonucleotide
  source 1..20: mol_type = other DNA
gctgatggcaacttcaactg

SEQ ID NO: 495 - DNA, 20 bp, synthetic construct
  misc_feature 1..20: note = Description of Artificial Sequence: Syntheticoligonucleotide
  source 1..20: mol_type = other DNA
ctgatggcaacttcaactgg

SEQ ID NO: 496 - DNA, 20 bp, synthetic construct
  misc_feature 1..20: note = Description of Artificial Sequence: Syntheticoligonucleotide
  source 1..20: mol_type = other DNA
aactggggccgggttgttgc

SEQ ID NO: 497 - DNA, 20 bp, synthetic construct
  misc_feature 1..20: note = Description of Artificial Sequence: Syntheticoligonucleotide
  source 1..20: mol_type = other DNA
ttgcccttttctactttgct

SEQ ID NO: 498 - DNA, 20 bp, synthetic construct
  misc_feature 1..20: note = Description of Artificial Sequence: Syntheticoligonucleotide
  source 1..20: mol_type = other DNA
cccttttctactttgctagc

SEQ ID NO: 499 - DNA, 20 bp, synthetic construct
  misc_feature 1..20: note = Description of Artificial Sequence: Syntheticoligonucleotide
  source 1..20: mol_type = other DNA
ctagcaaagtagaaaagggc

SEQ ID NO: 500 - DNA, 20 bp, synthetic construct
  misc_feature 1..20: note = Description of Artificial Sequence: Syntheticoligonucleotide
  source 1..20: mol_type = other DNA
gctagcaaagtagaaaaggg

SEQ ID NO: 501 - DNA, 20 bp, synthetic construct
  misc_feature 1..20: note = Description of Artificial Sequence: Syntheticoligonucleotide
  source 1..20: mol_type = other DNA
tctactttgctagcaaactg

SEQ ID NO: 502 - DNA, 20 bp, synthetic construct
  misc_feature 1..20: note = Description of Artificial Sequence: Syntheticoligonucleotide
  source 1..20: mol_type = other DNA
ctactttgctagcaaactgg

SEQ ID NO: 503 - DNA, 20 bp, synthetic construct
  misc_feature 1..20: note = Description of Artificial Sequence: Syntheticoligonucleotide
  source 1..20: mol_type = other DNA
tactttgctagcaaactggt

SEQ ID NO: 504 - DNA, 20 bp, synthetic construct
  misc_feature 1..20: note = Description of Artificial Sequence: Syntheticoligonucleotide
  source 1..20: mol_type = other DNA
gctagcaaactggtgctcaa

SEQ ID NO: 505 - DNA, 20 bp, synthetic construct
  misc_feature 1..20: note = Description of Artificial Sequence: Syntheticoligonucleotide
  source 1..20: mol_type = other DNA
ctagcaaactggtgctcaag

SEQ ID NO: 506 - DNA, 20 bp, synthetic construct
  misc_feature 1..20: note = Description of Artificial Sequence: Syntheticoligonucleotide
  source 1..20: mol_type = other DNA
agcaccagtttgctagcaaa

SEQ ID NO: 507 - DNA, 20 bp, synthetic construct
  misc_feature 1..20: note = Description of Artificial Sequence: Syntheticoligonucleotide
  source 1..20: mol_type = other DNA
ccactttgtcagtgcgtctg

SEQ ID NO: 508 - DNA, 20 bp, synthetic construct
  misc_feature 1..20: note = Description of Artificial Sequence: Syntheticoligonucleotide
  source 1..20: mol_type = other DNA
ctcaatgggatggaaggctg

SEQ ID NO: 509 - DNA, 20 bp, synthetic construct
  misc_feature 1..20: note = Description of Artificial Sequence: Syntheticoligonucleotide
  source 1..20: mol_type = other DNA
aggaatacatggtacacgtt

SEQ ID NO: 510 - DNA, 20 bp, synthetic construct
  misc_feature 1..20: note = Description of Artificial Sequence: Syntheticoligonucleotide
  source 1..20: mol_type = other DNA
aagaacattttcagcttctc

SEQ ID NO: 511 - DNA, 20 bp, synthetic construct
  misc_feature 1..20: note = Description of Artificial Sequence: Syntheticoligonucleotide
  source 1..20: mol_type = other DNA
atccactttcattctgcgtt

SEQ ID NO: 512 - DNA, 20 bp, synthetic construct
  misc_feature 1..20: note = Description of Artificial Sequence: Syntheticoligonucleotide
  source 1..20: mol_type = other DNA
tttgttaaaggaggcaaaga

SEQ ID NO: 513 - DNA, 20 bp, synthetic construct
  misc_feature 1..20: note = Description of Artificial Sequence: Syntheticoligonucleotide
  source 1..20: mol_type = other DNA
tccccagagtccatgtcaga

SEQ ID NO: 514 - DNA, 20 bp, synthetic construct
  misc_feature 1..20: note = Description of Artificial Sequence: Syntheticoligonucleotide
  source 1..20: mol_type = other DNA
tcagtgcgtctgacatggac

SEQ ID NO: 515 - DNA, 20 bp, synthetic construct
  misc_feature 1..20: note = Description of Artificial Sequence: Syntheticoligonucleotide
  source 1..20: mol_type = other DNA
gtcagtgcgtctgacatgga

SEQ ID NO: 516 - DNA, 20 bp, synthetic construct
  misc_feature 1..20: note = Description of Artificial Sequence: Syntheticoligonucleotide
  source 1..20: mol_type = other DNA
ccactttgtcagtgcgtctg

SEQ ID NO: 517 - DNA, 20 bp, synthetic construct
  misc_feature 1..20: note = Description of Artificial Sequence: Syntheticoligonucleotide
  source 1..20: mol_type = other DNA
tgttcccactttgtcagtgc

SEQ ID NO: 518 - DNA, 20 bp, synthetic construct
  misc_feature 1..20: note = Description of Artificial Sequence: Syntheticoligonucleotide
  source 1..20: mol_type = other DNA
ctcaatgggatggaaggctg

SEQ ID NO: 519 - DNA, 20 bp, synthetic construct
  misc_feature 1..20: note = Description of Artificial Sequence: Syntheticoligonucleotide
  source 1..20: mol_type = other DNA
catcccattgaggaatacat

SEQ ID NO: 520 - DNA, 20 bp, synthetic construct
  misc_feature 1..20: note = Description of Artificial Sequence: Syntheticoligonucleotide
  source 1..20: mol_type = other DNA
aggaatacatggtacacgtt

SEQ ID NO: 521 - DNA, 20 bp, synthetic construct
  misc_feature 1..20: note = Description of Artificial Sequence: Syntheticoligonucleotide
  source 1..20: mol_type = other DNA
aacgtgtaccatgtattcct

SEQ ID NO: 522 - DNA, 20 bp, synthetic construct
  misc_feature 1..20: note = Description of Artificial Sequence: Syntheticoligonucleotide
  source 1..20: mol_type = other DNA
ttcaacgtgtaccatgtatt

SEQ ID NO: 523 - DNA, 20 bp, synthetic construct
  misc_feature 1..20: note = Description of Artificial Sequence: Syntheticoligonucleotide
  source 1..20: mol_type = other DNA
aagaacattttcagcttctc

SEQ ID NO: 524 - DNA, 20 bp, synthetic construct
  misc_feature 1..20: note = Description of Artificial Sequence: Syntheticoligonucleotide
  source 1..20: mol_type = other DNA
gagaagctgaaaatgttctt

SEQ ID NO: 525 - DNA, 20 bp, synthetic construct
  misc_feature 1..20: note = Description of Artificial Sequence: Syntheticoligonucleotide
  source 1..20: mol_type = other DNA
tcagcttctcgaacgcagaa

SEQ ID NO: 526 - DNA, 20 bp, synthetic construct
  misc_feature 1..20: note = Description of Artificial Sequence: Syntheticoligonucleotide
  source 1..20: mol_type = other DNA
cagcttctcgaacgcagaat

SEQ ID NO: 527 - DNA, 20 bp, synthetic construct
  misc_feature 1..20: note = Description of Artificial Sequence: Syntheticoligonucleotide
  source 1..20: mol_type = other DNA
tgcgttcgagaagctgaaaa

SEQ ID NO: 528 - DNA, 20 bp, synthetic construct
  misc_feature 1..20: note = Description of Artificial Sequence: Syntheticoligonucleotide
  source 1..20: mol_type = other DNA
agcttctcgaacgcagaatg

SEQ ID NO: 529 - DNA, 20 bp, synthetic construct
  misc_feature 1..20: note = Description of Artificial Sequence: Syntheticoligonucleotide
  source 1..20: mol_type = other DNA
attctgcgttcgagaagctg

SEQ ID NO: 530 - DNA, 20 bp, synthetic construct
  misc_feature 1..20: note = Description of Artificial Sequence: Syntheticoligonucleotide
  source 1..20: mol_type = other DNA
cattctgcgttcgagaagct

SEQ ID NO: 531 - DNA, 20 bp, synthetic construct
  misc_feature 1..20: note = Description of Artificial Sequence: Syntheticoligonucleotide
  source 1..20: mol_type = other DNA
tcgaacgcagaatgaaagtg

SEQ ID NO: 532 - DNA, 20 bp, synthetic construct
  misc_feature 1..20: note = Description of Artificial Sequence: Syntheticoligonucleotide
  source 1..20: mol_type = other DNA
atccactttcattctgcgtt

SEQ ID NO: 533 - DNA, 20 bp, synthetic construct
  misc_feature 1..20: note = Description of Artificial Sequence: Syntheticoligonucleotide
  source 1..20: mol_type = other DNA
tatccactttcattctgcgt

SEQ ID NO: 534 - DNA, 20 bp, synthetic construct
  misc_feature 1..20: note = Description of Artificial Sequence: Syntheticoligonucleotide
  source 1..20: mol_type = other DNA
ttatccactttcattctgcg

SEQ ID NO: 535 - DNA, 20 bp, synthetic construct
  misc_feature 1..20: note = Description of Artificial Sequence: Syntheticoligonucleotide
  source 1..20: mol_type = other DNA
tttatccactttcattctgc

SEQ ID NO: 536 - DNA, 20 bp, synthetic construct
  misc_feature 1..20: note = Description of Artificial Sequence: Syntheticoligonucleotide
  source 1..20: mol_type = other DNA
ttttatccactttcattctg

SEQ ID NO: 537 - DNA, 20 bp, synthetic construct
  misc_feature 1..20: note = Description of Artificial Sequence: Syntheticoligonucleotide
  source 1..20: mol_type = other DNA
aacaaagaagggtcatcagt

SEQ ID NO: 538 - DNA, 20 bp, synthetic construct
  misc_feature 1..20: note = Description of Artificial Sequence: Syntheticoligonucleotide
  source 1..20: mol_type = other DNA
cctcctttaacaaagaaggg

SEQ ID NO: 539 - DNA, 20 bp, synthetic construct
  misc_feature 1..20: note = Description of Artificial Sequence: Syntheticoligonucleotide
  source 1..20: mol_type = other DNA
gcctcctttaacaaagaagg

SEQ ID NO: 540 - DNA, 20 bp, synthetic construct
  misc_feature 1..20: note = Description of Artificial Sequence: Syntheticoligonucleotide
  source 1..20: mol_type = other DNA
tttgttaaaggaggcaaaga

SEQ ID NO: 541 - DNA, 20 bp, synthetic construct
  misc_feature 1..20: note = Description of Artificial Sequence: Syntheticoligonucleotide
  source 1..20: mol_type = other DNA
gttaaaggaggcaaagacaa

SEQ ID NO: 542 - DNA, 20 bp, synthetic construct
  misc_feature 1..20: note = Description of Artificial Sequence: Syntheticoligonucleotide
  source 1..20: mol_type = other DNA
ttaaaggaggcaaagacaaa

SEQ ID NO: 543 - DNA, 20 bp, synthetic construct
  misc_feature 1..20: note = Description of Artificial Sequence: Syntheticoligonucleotide
  source 1..20: mol_type = other DNA
tctttgcctcctttaacaaa

SEQ ID NO: 544 - DNA, 20 bp, synthetic construct
  misc_feature 1..20: note = Description of Artificial Sequence: Syntheticoligonucleotide
  source 1..20: mol_type = other DNA
gtctttgcctcctttaacaa

SEQ ID NO: 545 - DNA, 20 bp, synthetic construct
  misc_feature 1..20: note = Description of Artificial Sequence: Syntheticoligonucleotide
  source 1..20: mol_type = other DNA
gtctaacttactttgtcttt

SEQ ID NO: 546 - DNA, 20 bp, synthetic construct
  misc_feature 1..20: note = Description of Artificial Sequence: Syntheticoligonucleotide
  source 1..20: mol_type = other DNA
ttggtctaacttactttgtc

SEQ ID NO: 547 - DNA, 56 bp, synthetic construct
  misc_feature 1..56: note = Description of Artificial Sequence: Syntheticoligonucleotide
  source 1..56: mol_type = other DNA
ctttcaagactaatagattgctccttacgaggagactggatatctgtgggacaaga

SEQ ID NO: 548 - DNA, 56 bp, synthetic construct
  misc_feature 1..56: note = Description of Artificial Sequence: Syntheticoligonucleotide
  source 1..56: mol_type = other DNA
ctttcaagactaatagattgctccttacgaggagactcccacagatatccagaacc

SEQ ID NO: 549 - DNA, 56 bp, synthetic construct
  misc_feature 1..56: note = Description of Artificial Sequence: Syntheticoligonucleotide
  source 1..56: mol_type = other DNA
ctttcaagactaatagattgctccttacgaggagacgagtctctcagctggtacac

SEQ ID NO: 550 - DNA, 56 bp, synthetic construct
  misc_feature 1..56: note = Description of Artificial Sequence: Syntheticoligonucleotide
  source 1..56: mol_type = other DNA
ctttcaagactaatagattgctccttacgaggagacagagtctctcagctggtaca

SEQ ID NO: 551 - DNA, 56 bp, synthetic construct
  misc_feature 1..56: note = Description of Artificial Sequence: Syntheticoligonucleotide
  source 1..56: mol_type = other DNA
ctttcaagactaatagattgctccttacgaggagactcactggatttagagtctct

SEQ ID NO: 552 - DNA, 56 bp, synthetic construct
  misc_feature 1..56: note = Description of Artificial Sequence: Syntheticoligonucleotide
  source 1..56: mol_type = other DNA
ctttcaagactaatagattgctccttacgaggagacagaatcaaaatcggtgaata

SEQ ID NO: 553 - DNA, 56 bp, synthetic construct
  misc_feature 1..56: note = Description of Artificial Sequence: Syntheticoligonucleotide
  source 1..56: mol_type = other DNA
ctttcaagactaatagattgctccttacgaggagacgagaatcaaaatcggtgaat

SEQ ID NO: 554 - DNA, 56 bp, synthetic construct
  misc_feature 1..56: note = Description of Artificial Sequence: Syntheticoligonucleotide
  source 1..56: mol_type = other DNA
ctttcaagactaatagattgctccttacgaggagacaccgattttgattctcaaac

SEQ ID NO: 555 - DNA, 56 bp, synthetic construct
  misc_feature 1..56: note = Description of Artificial Sequence: Syntheticoligonucleotide
  source 1..56: mol_type = other DNA
ctttcaagactaatagattgctccttacgaggagactttgagaatcaaaatcggtg

SEQ ID NO: 556 - DNA, 56 bp, synthetic construct
  misc_feature 1..56: note = Description of Artificial Sequence: Syntheticoligonucleotide
  source 1..56: mol_type = other DNA
ctttcaagactaatagattgctccttacgaggagacgtttgagaatcaaaatcggt

SEQ ID NO: 557 - DNA, 56 bp, synthetic construct
  misc_feature 1..56: note = Description of Artificial Sequence: Syntheticoligonucleotide
  source 1..56: mol_type = other DNA
ctttcaagactaatagattgctccttacgaggagactgattctcaaacaaatgtgt

SEQ ID NO: 558 - DNA, 56 bp, synthetic construct
  misc_feature 1..56: note = Description of Artificial Sequence: Syntheticoligonucleotide
  source 1..56: mol_type = other DNA
ctttcaagactaatagattgctccttacgaggagacgattctcaaacaaatgtgtc

SEQ ID NO: 559 - DNA, 56 bp, synthetic construct
  misc_feature 1..56: note = Description of Artificial Sequence: Syntheticoligonucleotide
  source 1..56: mol_type = other DNA
ctttcaagactaatagattgctccttacgaggagacattctcaaacaaatgtgtca

SEQ ID NO: 560 - DNA, 56 bp, synthetic construct
  misc_feature 1..56: note = Description of Artificial Sequence: Syntheticoligonucleotide
  source 1..56: mol_type = other DNA
ctttcaagactaatagattgctccttacgaggagactgacacatttgtttgagaat

SEQ ID NO: 561 - DNA, 56 bp, synthetic construct
  misc_feature 1..56: note = Description of Artificial Sequence: Syntheticoligonucleotide
  source 1..56: mol_type = other DNA
ctttcaagactaatagattgctccttacgaggagactcaaacaaatgtgtcacaaa

SEQ ID NO: 562 - DNA, 56 bp, synthetic construct
  misc_feature 1..56: note = Description of Artificial Sequence: Syntheticoligonucleotide
  source 1..56: mol_type = other DNA
ctttcaagactaatagattgctccttacgaggagacgtgacacatttgtttgagaa

SEQ ID NO: 563 - DNA, 56 bp, synthetic construct
  misc_feature 1..56: note = Description of Artificial Sequence: Syntheticoligonucleotide
  source 1..56: mol_type = other DNA
ctttcaagactaatagattgctccttacgaggagacctttgtgacacatttgtttg

SEQ ID NO: 564 - DNA, 56 bp, synthetic construct
  misc_feature 1..56: note = Description of Artificial Sequence: Syntheticoligonucleotide
  source 1..56: mol_type = other DNA
ctttcaagactaatagattgctccttacgaggagactgatgtgtatatcacagaca

SEQ ID NO: 565 - DNA, 56 bp, synthetic construct
  misc_feature 1..56: note = Description of Artificial Sequence: Syntheticoligonucleotide
  source 1..56: mol_type = other DNA
ctttcaagactaatagattgctccttacgaggagactctgtgatatacacatcaga

SEQ ID NO: 566 - DNA, 56 bp, synthetic construct
  misc_feature 1..56: note = Description of Artificial Sequence: Syntheticoligonucleotide
  source 1..56: mol_type = other DNA
ctttcaagactaatagattgctccttacgaggagacgtctgtgatatacacatcag

SEQ ID NO: 567 - DNA, 56 bp, synthetic construct
  misc_feature 1..56: note = Description of Artificial Sequence: Syntheticoligonucleotide
  source 1..56: mol_type = other DNA
ctttcaagactaatagattgctccttacgaggagactgtctgtgatatacacatca

SEQ ID NO: 568 - DNA, 56 bp, synthetic construct
  misc_feature 1..56: note = Description of Artificial Sequence: Syntheticoligonucleotide
  source 1..56: mol_type = other DNA
ctttcaagactaatagattgctccttacgaggagacaagtccatagacctcatgtc

SEQ ID NO: 569 - DNA, 56 bp, synthetic construct
  misc_feature 1..56: note = Description of Artificial Sequence: Syntheticoligonucleotide
  source 1..56: mol_type = other DNA
ctttcaagactaatagattgctccttacgaggagacctcttgaagtccatagacct

SEQ ID NO: 570 - DNA, 56 bp, synthetic construct
  misc_feature 1..56: note = Description of Artificial Sequence: Syntheticoligonucleotide
  source 1..56: mol_type = other DNA
ctttcaagactaatagattgctccttacgaggagacaagagcaacagtgctgtggc

SEQ ID NO: 571 - DNA, 56 bp, synthetic construct
  misc_feature 1..56: note = Description of Artificial Sequence: Syntheticoligonucleotide
  source 1..56: mol_type = other DNA
ctttcaagactaatagattgctccttacgaggagacctccaggccacagcactgtt

SEQ ID NO: 572 - DNA, 56 bp, synthetic construct
  misc_feature 1..56: note = Description of Artificial Sequence: Syntheticoligonucleotide
  source 1..56: mol_type = other DNA
ctttcaagactaatagattgctccttacgaggagacttgctccaggccacagcact

SEQ ID NO: 573 - DNA, 56 bp, synthetic construct
  misc_feature 1..56: note = Description of Artificial Sequence: Syntheticoligonucleotide
  source 1..56: mol_type = other DNA
ctttcaagactaatagattgctccttacgaggagacgttgctccaggccacagcac

SEQ ID NO: 574 - DNA, 56 bp, synthetic construct
  misc_feature 1..56: note = Description of Artificial Sequence: Syntheticoligonucleotide
  source 1..56: mol_type = other DNA
ctttcaagactaatagattgctccttacgaggagaccacatgcaaagtcagatttg

SEQ ID NO: 575 - DNA, 56 bp, synthetic construct
  misc_feature 1..56: note = Description of Artificial Sequence: Syntheticoligonucleotide
  source 1..56: mol_type = other DNA
ctttcaagactaatagattgctccttacgaggagacgcacatgcaaagtcagattt

SEQ ID NO: 576 - DNA, 56 bp, synthetic construct
  misc_feature 1..56: note = Description of Artificial Sequence: Syntheticoligonucleotide
  source 1..56: mol_type = other DNA
ctttcaagactaatagattgctccttacgaggagacgcatgtgcaaacgccttcaa

SEQ ID NO: 577 - DNA, 56 bp, synthetic construct
  misc_feature 1..56: note = Description of Artificial Sequence: Syntheticoligonucleotide
  source 1..56: mol_type = other DNA
ctttcaagactaatagattgctccttacgaggagacaaggcgtttgcacatgcaaa

SEQ ID NO: 578 - DNA, 56 bp, synthetic construct
  misc_feature 1..56: note = Description of Artificial Sequence: Syntheticoligonucleotide
  source 1..56: mol_type = other DNA
ctttcaagactaatagattgctccttacgaggagaccatgtgcaaacgccttcaac

SEQ ID NO: 579 - DNA, 56 bp, synthetic construct
  misc_feature 1..56: note = Description of Artificial Sequence: Syntheticoligonucleotide
  source 1..56: mol_type = other DNA
ctttcaagactaatagattgctccttacgaggagacttgaaggcgtttgcacatgc

SEQ ID NO: 580 - DNA, 56 bp, synthetic construct
  misc_feature 1..56: note = Description of Artificial Sequence: Syntheticoligonucleotide
  source 1..56: mol_type = other DNA
ctttcaagactaatagattgctccttacgaggagacaacaacagcattattccaga

SEQ ID NO: 581 - DNA, 56 bp, synthetic construct
  misc_feature 1..56: note = Description of Artificial Sequence: Syntheticoligonucleotide
  source 1..56: mol_type = other DNA
ctttcaagactaatagattgctccttacgaggagactggaataatgctgttgttga

SEQ ID NO: 582 - DNA, 56 bp, synthetic construct
  misc_feature 1..56: note = Description of Artificial Sequence: Syntheticoligonucleotide
  source 1..56: mol_type = other DNA
ctttcaagactaatagattgctccttacgaggagacttccagaagacaccttcttc

SEQ ID NO: 583 - DNA, 56 bp, synthetic construct
  misc_feature 1..56: note = Description of Artificial Sequence: Syntheticoligonucleotide
  source 1..56: mol_type = other DNA
ctttcaagactaatagattgctccttacgaggagaccagaagacaccttcttcccc

SEQ ID NO: 584 - DNA, 56 bp, synthetic construct
  misc_feature 1..56: note = Description of Artificial Sequence: Syntheticoligonucleotide
  source 1..56: mol_type = other DNA
ctttcaagactaatagattgctccttacgaggagaccctgggctggggaagaaggt

SEQ ID NO: 585 - DNA, 56 bp, synthetic construct
  misc_feature 1..56: note = Description of Artificial Sequence: Syntheticoligonucleotide
  source 1..56: mol_type = other DNA
ctttcaagactaatagattgctccttacgaggagacttccccagcccaggtaaggg

SEQ ID NO: 586 - DNA, 56 bp, synthetic construct
  misc_feature 1..56: note = Description of Artificial Sequence: Syntheticoligonucleotide
  source 1..56: mol_type = other DNA
ctttcaagactaatagattgctccttacgaggagaccccagcccaggtaagggcag

SEQ ID NO: 587 - DNA, 56 bp, synthetic construct
  misc_feature 1..56: note = Description of Artificial Sequence: Syntheticoligonucleotide
  source 1..56: mol_type = other DNA
ctttcaagactaatagattgctccttacgaggagactaaaaggaaaaacagacatt

SEQ ID NO: 588 - DNA, 56 bp, synthetic construct
  misc_feature 1..56: note = Description of Artificial Sequence: Syntheticoligonucleotide
  source 1..56: mol_type = other DNA
ctttcaagactaatagattgctccttacgaggagacctaaaaggaaaaacagacat

SEQ ID NO: 589 - DNA, 56 bp, synthetic construct
  misc_feature 1..56: note = Description of Artificial Sequence: Syntheticoligonucleotide
  source 1..56: mol_type = other DNA
ctttcaagactaatagattgctccttacgaggagacttccttttagaaagttcctg

SEQ ID NO: 590 - DNA, 56 bp, synthetic construct
  misc_feature 1..56: note = Description of Artificial Sequence: Syntheticoligonucleotide
  source 1..56: mol_type = other DNA
ctttcaagactaatagattgctccttacgaggagactccttttagaaagttcctgt

SEQ ID NO: 591 - DNA, 56 bp, synthetic construct
  misc_feature 1..56: note = Description of Artificial Sequence: Syntheticoligonucleotide
  source 1..56: mol_type = other DNA
ctttcaagactaatagattgctccttacgaggagacccttttagaaagttcctgtg

SEQ ID NO: 592 - DNA, 56 bp, synthetic construct
  misc_feature 1..56: note = Description of Artificial Sequence: Syntheticoligonucleotide
  source 1..56: mol_type = other DNA
ctttcaagactaatagattgctccttacgaggagaccttttagaaagttcctgtga

SEQ ID NO: 593 - DNA, 56 bp, synthetic construct
  misc_feature 1..56: note = Description of Artificial Sequence: Syntheticoligonucleotide
  source 1..56: mol_type = other DNA
ctttcaagactaatagattgctccttacgaggagactagaaagttcctgtgatgtc

SEQ ID NO: 594 - DNA, 56 bp, synthetic construct
  misc_feature 1..56: note = Description of Artificial Sequence: Syntheticoligonucleotide
  source 1..56: mol_type = other DNA
ctttcaagactaatagattgctccttacgaggagacagaaagttcctgtgatgtca

SEQ ID NO: 595 - DNA, 56 bp, synthetic construct
  misc_feature 1..56: note = Description of Artificial Sequence: Syntheticoligonucleotide
  source 1..56: mol_type = other DNA
ctttcaagactaatagattgctccttacgaggagacgaaagttcctgtgatgtcaa

SEQ ID NO: 596 - DNA, 56 bp, synthetic construct
  misc_feature 1..56: note = Description of Artificial Sequence: Syntheticoligonucleotide
  source 1..56: mol_type = other DNA
ctttcaagactaatagattgctccttacgaggagacacatcacaggaactttctaa

SEQ ID NO: 597 - DNA, 56 bp, synthetic construct
  misc_feature 1..56: note = Description of Artificial Sequence: Syntheticoligonucleotide
  source 1..56: mol_type = other DNA
ctttcaagactaatagattgctccttacgaggagacctgtgatgtcaagctggtcg

SEQ ID NO: 598 - DNA, 56 bp, synthetic construct
  misc_feature 1..56: note = Description of Artificial Sequence: Syntheticoligonucleotide
  source 1..56: mol_type = other DNA
ctttcaagactaatagattgctccttacgaggagactcgaccagcttgacatcaca

SEQ ID NO: 599 - DNA, 56 bp, synthetic construct
  misc_feature 1..56: note = Description of Artificial Sequence: Syntheticoligonucleotide
  source 1..56: mol_type = other DNA
ctttcaagactaatagattgctccttacgaggagacctcgaccagcttgacatcac

SEQ ID NO: 600 - DNA, 56 bp, synthetic construct
  misc_feature 1..56: note = Description of Artificial Sequence: Syntheticoligonucleotide
  source 1..56: mol_type = other DNA
ctttcaagactaatagattgctccttacgaggagactctcgaccagcttgacatca

SEQ ID NO: 601 - DNA, 56 bp, synthetic construct
  misc_feature 1..56: note = Description of Artificial Sequence: Syntheticoligonucleotide
  source 1..56: mol_type = other DNA
ctttcaagactaatagattgctccttacgaggagacaaagcttttctcgaccagct

SEQ ID NO: 602 - DNA, 56 bp, synthetic construct
  misc_feature 1..56: note = Description of Artificial Sequence: Syntheticoligonucleotide
  source 1..56: mol_type = other DNA
ctttcaagactaatagattgctccttacgaggagaccaaagcttttctcgaccagc

SEQ ID NO: 603 - DNA, 56 bp, synthetic construct
  misc_feature 1..56: note = Description of Artificial Sequence: Syntheticoligonucleotide
  source 1..56: mol_type = other DNA
ctttcaagactaatagattgctccttacgaggagaccctgtttcaaagcttttctc

SEQ ID NO: 604 - DNA, 56 bp, synthetic construct
  misc_feature 1..56: note = Description of Artificial Sequence: Syntheticoligonucleotide
  source 1..56: mol_type = other DNA
ctttcaagactaatagattgctccttacgaggagacgaaacaggtaagacaggggt

SEQ ID NO: 605 - DNA, 56 bp, synthetic construct
  misc_feature 1..56: note = Description of Artificial Sequence: Syntheticoligonucleotide
  source 1..56: mol_type = other DNA
ctttcaagactaatagattgctccttacgaggagacaaacaggtaagacaggggtc

SEQ ID NO: 606 - DNA, 57 bp, synthetic construct
  misc_feature 1..57: note = Description of Artificial Sequence: Syntheticoligonucleotide
  source 1..57: mol_type = other DNA
gctggggaccgatcctgattgctcgctgcggcgagactggatatctgtgggacaaga

SEQ ID NO: 607 - DNA, 57 bp, synthetic construct
  misc_feature 1..57: note = Description of Artificial Sequence: Syntheticoligonucleotide
  source 1..57: mol_type = other DNA
gctggggaccgatcctgattgctcgctgcggcgagactcccacagatatccagaacc

SEQ ID NO: 608 - DNA, 57 bp, synthetic construct
  misc_feature 1..57: note = Description of Artificial Sequence: Syntheticoligonucleotide
  source 1..57: mol_type = other DNA
gctggggaccgatcctgattgctcgctgcggcgagacgagtctctcagctggtacac

SEQ ID NO: 609 - DNA, 57 bp, synthetic construct
  misc_feature 1..57: note = Description of Artificial Sequence: Syntheticoligonucleotide
  source 1..57: mol_type = other DNA
gctggggaccgatcctgattgctcgctgcggcgagacagagtctctcagctggtaca

SEQ ID NO: 610 - DNA, 57 bp, synthetic construct
  misc_feature 1..57: note = Description of Artificial Sequence: Syntheticoligonucleotide
  source 1..57: mol_type = other DNA
gctggggaccgatcctgattgctcgctgcggcgagactcactggatttagagtctct

SEQ ID NO: 611 - DNA, 57 bp, synthetic construct
  misc_feature 1..57: note = Description of Artificial Sequence: Syntheticoligonucleotide
  source 1..57: mol_type = other DNA
gctggggaccgatcctgattgctcgctgcggcgagacagaatcaaaatcggtgaata

SEQ ID NO: 612 - DNA, 57 bp, synthetic construct
  misc_feature 1..57: note = Description of Artificial Sequence: Syntheticoligonucleotide
  source 1..57: mol_type = other DNA
gctggggaccgatcctgattgctcgctgcggcgagacgagaatcaaaatcggtgaat

SEQ ID NO: 613 - DNA, 57 bp, synthetic construct
  misc_feature 1..57: note = Description of Artificial Sequence: Syntheticoligonucleotide
  source 1..57: mol_type = other DNA
gctggggaccgatcctgattgctcgctgcggcgagacaccgattttgattctcaaac

SEQ ID NO: 614 - DNA, 57 bp, synthetic construct
  misc_feature 1..57: note = Description of Artificial Sequence: Syntheticoligonucleotide
  source 1..57: mol_type = other DNA
gctggggaccgatcctgattgctcgctgcggcgagactttgagaatcaaaatcggtg

SEQ ID NO: 615 - DNA, 57 bp, synthetic construct
  misc_feature 1..57: note = Description of Artificial Sequence: Syntheticoligonucleotide
  source 1..57: mol_type = other DNA
gctggggaccgatcctgattgctcgctgcggcgagacgtttgagaatcaaaatcggt

SEQ ID NO: 616 - DNA, 57 bp, synthetic construct
  misc_feature 1..57: note = Description of Artificial Sequence: Syntheticoligonucleotide
  source 1..57: mol_type = other DNA
gctggggaccgatcctgattgctcgctgcggcgagactgattctcaaacaaatgtgt

SEQ ID NO: 617 - DNA, 57 bp, synthetic construct
  misc_feature 1..57: note = Description of Artificial Sequence: Syntheticoligonucleotide
  source 1..57: mol_type = other DNA
gctggggaccgatcctgattgctcgctgcggcgagacgattctcaaacaaatgtgtc

SEQ ID NO: 618 - DNA, 57 bp, synthetic construct
  misc_feature 1..57: note = Description of Artificial Sequence: Syntheticoligonucleotide
  source 1..57: mol_type = other DNA
gctggggaccgatcctgattgctcgctgcggcgagacattctcaaacaaatgtgtca

SEQ ID NO: 619 - DNA, 57 bp, synthetic construct
  misc_feature 1..57: note = Description of Artificial Sequence: Syntheticoligonucleotide
  source 1..57: mol_type = other DNA
gctggggaccgatcctgattgctcgctgcggcgagactgacacatttgtttgagaat

SEQ ID NO: 620 - DNA, 57 bp, synthetic construct
  misc_feature 1..57: note = Description of Artificial Sequence: Syntheticoligonucleotide
  source 1..57: mol_type = other DNA
gctggggaccgatcctgattgctcgctgcggcgagactcaaacaaatgtgtcacaaa

SEQ ID NO: 621 - DNA, 57 bp, synthetic construct
  misc_feature 1..57: note = Description of Artificial Sequence: Syntheticoligonucleotide
  source 1..57: mol_type = other DNA
gctggggaccgatcctgattgctcgctgcggcgagacgtgacacatttgtttgagaa

SEQ ID NO: 622 - DNA, 57 bp, synthetic construct
  misc_feature 1..57: note = Description of Artificial Sequence: Syntheticoligonucleotide
  source 1..57: mol_type = other DNA
gctggggaccgatcctgattgctcgctgcggcgagacctttgtgacacatttgtttg

SEQ ID NO: 623 - DNA, 57 bp, synthetic construct
  misc_feature 1..57: note = Description of Artificial Sequence: Syntheticoligonucleotide
  source 1..57: mol_type = other DNA
gctggggaccgatcctgattgctcgctgcggcgagactgatgtgtatatcacagaca

SEQ ID NO: 624 - DNA, 57 bp, synthetic construct
  misc_feature 1..57: note = Description of Artificial Sequence: Syntheticoligonucleotide
  source 1..57: mol_type = other DNA
gctggggaccgatcctgattgctcgctgcggcgagactctgtgatatacacatcaga

SEQ ID NO: 625 - DNA, 57 bp, synthetic construct
  misc_feature 1..57: note = Description of Artificial Sequence: Syntheticoligonucleotide
  source 1..57: mol_type = other DNA
gctggggaccgatcctgattgctcgctgcggcgagacgtctgtgatatacacatcag

SEQ ID NO: 626 - DNA, 57 bp, synthetic construct
  misc_feature 1..57: note = Description of Artificial Sequence: Syntheticoligonucleotide
  source 1..57: mol_type = other DNA
gctggggaccgatcctgattgctcgctgcggcgagactgtctgtgatatacacatca

SEQ ID NO: 627 - DNA, 57 bp, synthetic construct
  misc_feature 1..57: note = Description of Artificial Sequence: Syntheticoligonucleotide
  source 1..57: mol_type = other DNA
gctggggaccgatcctgattgctcgctgcggcgagacaagtccatagacctcatgtc

SEQ ID NO: 628 - DNA, 57 bp, synthetic construct
  misc_feature 1..57: note = Description of Artificial Sequence: Syntheticoligonucleotide
  source 1..57: mol_type = other DNA
gctggggaccgatcctgattgctcgctgcggcgagacctcttgaagtccatagacct

SEQ ID NO: 629 - DNA, 57 bp, synthetic construct
  misc_feature 1..57: note = Description of Artificial Sequence: Syntheticoligonucleotide
  source 1..57: mol_type = other DNA
gctggggaccgatcctgattgctcgctgcggcgagacaagagcaacagtgctgtggc

SEQ ID NO: 630 - DNA, 57 bp, synthetic construct
  misc_feature 1..57: note = Description of Artificial Sequence: Syntheticoligonucleotide
  source 1..57: mol_type = other DNA
gctggggaccgatcctgattgctcgctgcggcgagacctccaggccacagcactgtt

SEQ ID NO: 631 - DNA, 57 bp, synthetic construct
  misc_feature 1..57: note = Description of Artificial Sequence: Syntheticoligonucleotide
  source 1..57: mol_type = other DNA
gctggggaccgatcctgattgctcgctgcggcgagacttgctccaggccacagcact

SEQ ID NO: 632 - DNA, 57 bp, synthetic construct
  misc_feature 1..57: note = Description of Artificial Sequence: Syntheticoligonucleotide
  source 1..57: mol_type = other DNA
gctggggaccgatcctgattgctcgctgcggcgagacgttgctccaggccacagcac

SEQ ID NO: 633 - DNA, 57 bp, synthetic construct
  misc_feature 1..57: note = Description of Artificial Sequence: Syntheticoligonucleotide
  source 1..57: mol_type = other DNA
gctggggaccgatcctgattgctcgctgcggcgagaccacatgcaaagtcagatttg

SEQ ID NO: 634 - DNA, 57 bp, synthetic construct
  misc_feature 1..57: note = Description of Artificial Sequence: Syntheticoligonucleotide
  source 1..57: mol_type = other DNA
gctggggaccgatcctgattgctcgctgcggcgagacgcacatgcaaagtcagattt

SEQ ID NO: 635 - DNA, 57 bp, synthetic construct
  misc_feature 1..57: note = Description of Artificial Sequence: Syntheticoligonucleotide
  source 1..57: mol_type = other DNA
gctggggaccgatcctgattgctcgctgcggcgagacgcatgtgcaaacgccttcaa

SEQ ID NO: 636 - DNA, 57 bp, synthetic construct
  misc_feature 1..57: note = Description of Artificial Sequence: Syntheticoligonucleotide
  source 1..57: mol_type = other DNA
gctggggaccgatcctgattgctcgctgcggcgagacaaggcgtttgcacatgcaaa

SEQ ID NO: 637 - DNA, 57 bp, synthetic construct
  misc_feature 1..57: note = Description of Artificial Sequence: Syntheticoligonucleotide
  source 1..57: mol_type = other DNA
gctggggaccgatcctgattgctcgctgcggcgagaccatgtgcaaacgccttcaac

SEQ ID NO: 638 - DNA, 57 bp, synthetic construct
  misc_feature 1..57: note = Description of Artificial Sequence: Syntheticoligonucleotide
  source 1..57: mol_type = other DNA
gctggggaccgatcctgattgctcgctgcggcgagacttgaaggcgtttgcacatgc

SEQ ID NO: 639 - DNA, 57 bp, synthetic construct
  misc_feature 1..57: note = Description of Artificial Sequence: Syntheticoligonucleotide
  source 1..57: mol_type = other DNA
gctggggaccgatcctgattgctcgctgcggcgagacaacaacagcattattccaga

SEQ ID NO: 640 - DNA, 57 bp, synthetic construct
  misc_feature 1..57: note = Description of Artificial Sequence: Syntheticoligonucleotide
  source 1..57: mol_type = other DNA
gctggggaccgatcctgattgctcgctgcggcgagactggaataatgctgttgttga

SEQ ID NO: 641 - DNA, 57 bp, synthetic construct
  misc_feature 1..57: note = Description of Artificial Sequence: Syntheticoligonucleotide
  source 1..57: mol_type = other DNA
gctggggaccgatcctgattgctcgctgcggcgagacttccagaagacaccttcttc

SEQ ID NO: 642 - DNA, 57 bp, synthetic construct
  misc_feature 1..57: note = Description of Artificial Sequence: Syntheticoligonucleotide
  source 1..57: mol_type = other DNA
gctggggaccgatcctgattgctcgctgcggcgagaccagaagacaccttcttcccc

SEQ ID NO: 643 - DNA, 57 bp, synthetic construct
  misc_feature 1..57: note = Description of Artificial Sequence: Syntheticoligonucleotide
  source 1..57: mol_type = other DNA
gctggggaccgatcctgattgctcgctgcggcgagaccctgggctggggaagaaggt

SEQ ID NO: 644 - DNA, 57 bp, synthetic construct
  misc_feature 1..57: note = Description of Artificial Sequence: Syntheticoligonucleotide
  source 1..57: mol_type = other DNA
gctggggaccgatcctgattgctcgctgcggcgagacttccccagcccaggtaaggg

SEQ ID NO: 645 - DNA, 57 bp, synthetic construct
  misc_feature 1..57: note = Description of Artificial Sequence: Syntheticoligonucleotide
  source 1..57: mol_type = other DNA
gctggggaccgatcctgattgctcgctgcggcgagaccccagcccaggtaagggcag

SEQ ID NO: 646 - DNA, 57 bp, synthetic construct
  misc_feature 1..57: note = Description of Artificial Sequence: Syntheticoligonucleotide
  source 1..57: mol_type = other DNA
gctggggaccgatcctgattgctcgctgcggcgagactaaaaggaaaaacagacatt

SEQ ID NO: 647 - DNA, 57 bp, synthetic construct
  misc_feature 1..57: note = Description of Artificial Sequence: Syntheticoligonucleotide
  source 1..57: mol_type = other DNA
gctggggaccgatcctgattgctcgctgcggcgagacctaaaaggaaaaacagacat

SEQ ID NO: 648 - DNA, 57 bp, synthetic construct
  misc_feature 1..57: note = Description of Artificial Sequence: Syntheticoligonucleotide
  source 1..57: mol_type = other DNA
gctggggaccgatcctgattgctcgctgcggcgagacttccttttagaaagttcctg

SEQ ID NO: 649 - DNA, 57 bp, synthetic construct
  misc_feature 1..57: note = Description of Artificial Sequence: Syntheticoligonucleotide
  source 1..57: mol_type = other DNA
gctggggaccgatcctgattgctcgctgcggcgagactccttttagaaagttcctgt

SEQ ID NO: 650 - DNA, 57 bp, synthetic construct
  misc_feature 1..57: note = Description of Artificial Sequence: Syntheticoligonucleotide
  source 1..57: mol_type = other DNA
gctggggaccgatcctgattgctcgctgcggcgagacccttttagaaagttcctgtg

SEQ ID NO: 651 - DNA, 57 bp, synthetic construct
  misc_feature 1..57: note = Description of Artificial Sequence: Syntheticoligonucleotide
  source 1..57: mol_type = other DNA
gctggggaccgatcctgattgctcgctgcggcgagaccttttagaaagttcctgtga

SEQ ID NO: 652 - DNA, 57 bp, synthetic construct
  misc_feature 1..57: note = Description of Artificial Sequence: Syntheticoligonucleotide
  source 1..57: mol_type = other DNA
gctggggaccgatcctgattgctcgctgcggcgagactagaaagttcctgtgatgtc

SEQ ID NO: 653 - DNA, 57 bp, synthetic construct
  misc_feature 1..57: note = Description of Artificial Sequence: Syntheticoligonucleotide
  source 1..57: mol_type = other DNA
gctggggaccgatcctgattgctcgctgcggcgagacagaaagttcctgtgatgtca

SEQ ID NO: 654 - DNA, 57 bp, synthetic construct
  misc_feature 1..57: note = Description of Artificial Sequence: Syntheticoligonucleotide
  source 1..57: mol_type = other DNA
gctggggaccgatcctgattgctcgctgcggcgagacgaaagttcctgtgatgtcaa

SEQ ID NO: 655 - DNA, 57 bp, synthetic construct
  misc_feature 1..57: note = Description of Artificial Sequence: Syntheticoligonucleotide
  source 1..57: mol_type = other DNA
gctggggaccgatcctgattgctcgctgcggcgagacacatcacaggaactttctaa

SEQ ID NO: 656 - DNA, 57 bp, synthetic construct
  misc_feature 1..57: note = Description of Artificial Sequence: Syntheticoligonucleotide
  source 1..57: mol_type = other DNA
gctggggaccgatcctgattgctcgctgcggcgagacctgtgatgtcaagctggtcg

SEQ ID NO: 657 - DNA, 57 bp, synthetic construct
  misc_feature 1..57: note = Description of Artificial Sequence: Syntheticoligonucleotide
  source 1..57: mol_type = other DNA
gctggggaccgatcctgattgctcgctgcggcgagactcgaccagcttgacatcaca

SEQ ID NO: 658 - DNA, 57 bp, synthetic construct
  misc_feature 1..57: note = Description of Artificial Sequence: Syntheticoligonucleotide
  source 1..57: mol_type = other DNA
gctggggaccgatcctgattgctcgctgcggcgagacctcgaccagcttgacatcac

SEQ ID NO: 659 - DNA, 57 bp, synthetic construct
  misc_feature 1..57: note = Description of Artificial Sequence: Syntheticoligonucleotide
  source 1..57: mol_type = other DNA
gctggggaccgatcctgattgctcgctgcggcgagactctcgaccagcttgacatca

SEQ ID NO: 660 - DNA, 57 bp, synthetic construct
  misc_feature 1..57: note = Description of Artificial Sequence: Syntheticoligonucleotide
  source 1..57: mol_type = other DNA
gctggggaccgatcctgattgctcgctgcggcgagacaaagcttttctcgaccagct

SEQ ID NO: 661 - DNA, 57 bp, synthetic construct
  misc_feature 1..57: note = Description of Artificial Sequence: Syntheticoligonucleotide
  source 1..57: mol_type = other DNA
gctggggaccgatcctgattgctcgctgcggcgagaccaaagcttttctcgaccagc

SEQ ID NO: 662 - DNA, 57 bp, synthetic construct
  misc_feature 1..57: note = Description of Artificial Sequence: Syntheticoligonucleotide
  source 1..57: mol_type = other DNA
gctggggaccgatcctgattgctcgctgcggcgagaccctgtttcaaagcttttctc

SEQ ID NO: 663 - DNA, 57 bp, synthetic construct
  misc_feature 1..57: note = Description of Artificial Sequence: Syntheticoligonucleotide
  source 1..57: mol_type = other DNA
gctggggaccgatcctgattgctcgctgcggcgagacgaaacaggtaagacaggggt

SEQ ID NO: 664 - DNA, 57 bp, synthetic construct
  misc_feature 1..57: note = Description of Artificial Sequence: Syntheticoligonucleotide
  source 1..57: mol_type = other DNA
gctggggaccgatcctgattgctcgctgcggcgagacaaacaggtaagacaggggtc

SEQ ID NO: 665 - DNA, 56 bp, synthetic construct
  misc_feature 1..56: note = Description of Artificial Sequence: Syntheticoligonucleotide
  source 1..56: mol_type = other DNA
ctttcaagactaatagattgctccttacgaggagacaatataagtggaggcgtcgc

SEQ ID NO: 666 - DNA, 56 bp, synthetic construct
  misc_feature 1..56: note = Description of Artificial Sequence: Syntheticoligonucleotide
  source 1..56: mol_type = other DNA
ctttcaagactaatagattgctccttacgaggagacatataagtggaggcgtcgcg

SEQ ID NO: 667 - DNA, 56 bp, synthetic construct
  misc_feature 1..56: note = Description of Artificial Sequence: Syntheticoligonucleotide
  source 1..56: mol_type = other DNA
ctttcaagactaatagattgctccttacgaggagacaggaatgcccgccagcgcga

SEQ ID NO: 668 - DNA, 56 bp, synthetic construct
  misc_feature 1..56: note = Description of Artificial Sequence: Syntheticoligonucleotide
  source 1..56: mol_type = other DNA
ctttcaagactaatagattgctccttacgaggagacctgaagctgacagcattcgg

SEQ ID NO: 669 - DNA, 56 bp, synthetic construct
  misc_feature 1..56: note = Description of Artificial Sequence: Syntheticoligonucleotide
  source 1..56: mol_type = other DNA
ctttcaagactaatagattgctccttacgaggagacgggccgagatgtctcgctcc

SEQ ID NO: 670 - DNA, 56 bp, synthetic construct
  misc_feature 1..56: note = Description of Artificial Sequence: Syntheticoligonucleotide
  source 1..56: mol_type = other DNA
ctttcaagactaatagattgctccttacgaggagacgctgtgctcgcgctactctc

SEQ ID NO: 671 - DNA, 56 bp, synthetic construct
  misc_feature 1..56: note = Description of Artificial Sequence: Syntheticoligonucleotide
  source 1..56: mol_type = other DNA
ctttcaagactaatagattgctccttacgaggagacctggcctggaggctatccag

SEQ ID NO: 672 - DNA, 56 bp, synthetic construct
  misc_feature 1..56: note = Description of Artificial Sequence: Syntheticoligonucleotide
  source 1..56: mol_type = other DNA
ctttcaagactaatagattgctccttacgaggagactggcctggaggctatccagc

SEQ ID NO: 673 - DNA, 56 bp, synthetic construct
  misc_feature 1..56: note = Description of Artificial Sequence: Syntheticoligonucleotide
  source 1..56: mol_type = other DNA
ctttcaagactaatagattgctccttacgaggagacatgtgtcttttcccgatatt

SEQ ID NO: 674 - DNA, 56 bp, synthetic construct
  misc_feature 1..56: note = Description of Artificial Sequence: Syntheticoligonucleotide
  source 1..56: mol_type = other DNA
ctttcaagactaatagattgctccttacgaggagactcccgatattcctcaggtac

SEQ ID NO: 675 - DNA, 56 bp, synthetic construct
  misc_feature 1..56: note = Description of Artificial Sequence: Syntheticoligonucleotide
  source 1..56: mol_type = other DNA
ctttcaagactaatagattgctccttacgaggagaccccgatattcctcaggtact

SEQ ID NO: 676 - DNA, 56 bp, synthetic construct
  misc_feature 1..56: note = Description of Artificial Sequence: Syntheticoligonucleotide
  source 1..56: mol_type = other DNA
ctttcaagactaatagattgctccttacgaggagacccgatattcctcaggtactc

SEQ ID NO: 677 - DNA, 56 bp, synthetic construct
  misc_feature 1..56: note = Description of Artificial Sequence: Syntheticoligonucleotide
  source 1..56: mol_type = other DNA
ctttcaagactaatagattgctccttacgaggagacgagtacctgaggaatatcgg

SEQ ID NO: 678 - DNA, 56 bp, synthetic construct
  misc_feature 1..56: note = Description of Artificial Sequence: Syntheticoligonucleotide
  source 1..56: mol_type = other DNA
ctttcaagactaatagattgctccttacgaggagacggagtacctgaggaatatcg

SEQ ID NO: 679 - DNA, 56 bp, synthetic construct
  misc_feature 1..56: note = Description of Artificial Sequence: Syntheticoligonucleotide
  source 1..56: mol_type = other DNA
ctttcaagactaatagattgctccttacgaggagacctcaggtactccaaagattc

SEQ ID NO: 680 - DNA, 56 bp, synthetic construct
  misc_feature 1..56: note = Description of Artificial Sequence: Syntheticoligonucleotide
  source 1..56: mol_type = other DNA
ctttcaagactaatagattgctccttacgaggagacaggtttactcacgtcatcca

SEQ ID NO: 681 - DNA, 56 bp, synthetic construct
  misc_feature 1..56: note = Description of Artificial Sequence: Syntheticoligonucleotide
  source 1..56: mol_type = other DNA
ctttcaagactaatagattgctccttacgaggagacactcacgtcatccagcagag

SEQ ID NO: 682 - DNA, 56 bp, synthetic construct
  misc_feature 1..56: note = Description of Artificial Sequence: Syntheticoligonucleotide
  source 1..56: mol_type = other DNA
ctttcaagactaatagattgctccttacgaggagacctcacgtcatccagcagaga

SEQ ID NO: 683 - DNA, 56 bp, synthetic construct
  misc_feature 1..56: note = Description of Artificial Sequence: Syntheticoligonucleotide
  source 1..56: mol_type = other DNA
ctttcaagactaatagattgctccttacgaggagactctgctggatgacgtgagta

SEQ ID NO: 684 - DNA, 56 bp, synthetic construct
  misc_feature 1..56: note = Description of Artificial Sequence: Syntheticoligonucleotide
  source 1..56: mol_type = other DNA
ctttcaagactaatagattgctccttacgaggagaccattctctgctggatgacgt

SEQ ID NO: 685 - DNA, 56 bp, synthetic construct
  misc_feature 1..56: note = Description of Artificial Sequence: Syntheticoligonucleotide
  source 1..56: mol_type = other DNA
ctttcaagactaatagattgctccttacgaggagacccattctctgctggatgacg

SEQ ID NO: 686 - DNA, 56 bp, synthetic construct
  misc_feature 1..56: note = Description of Artificial Sequence: Syntheticoligonucleotide
  source 1..56: mol_type = other DNA
ctttcaagactaatagattgctccttacgaggagacactttccattctctgctgga

SEQ ID NO: 687 - DNA, 56 bp, synthetic construct
  misc_feature 1..56: note = Description of Artificial Sequence: Syntheticoligonucleotide
  source 1..56: mol_type = other DNA
ctttcaagactaatagattgctccttacgaggagacgactttccattctctgctgg

SEQ ID NO: 688 - DNA, 56 bp, synthetic construct
  misc_feature 1..56: note = Description of Artificial Sequence: Syntheticoligonucleotide
  source 1..56: mol_type = other DNA
ctttcaagactaatagattgctccttacgaggagacaggaaatttgactttccatt

SEQ ID NO: 689 - DNA, 56 bp, synthetic construct
  misc_feature 1..56: note = Description of Artificial Sequence: Syntheticoligonucleotide
  source 1..56: mol_type = other DNA
ctttcaagactaatagattgctccttacgaggagaccctgaattgctatgtgtctg

SEQ ID NO: 690 - DNA, 56 bp, synthetic construct
  misc_feature 1..56: note = Description of Artificial Sequence: Syntheticoligonucleotide
  source 1..56: mol_type = other DNA
ctttcaagactaatagattgctccttacgaggagacctgaattgctatgtgtctgg

SEQ ID NO: 691 - DNA, 56 bp, synthetic construct
  misc_feature 1..56: note = Description of Artificial Sequence: Syntheticoligonucleotide
  source 1..56: mol_type = other DNA
ctttcaagactaatagattgctccttacgaggagacctatgtgtctgggtttcatc

SEQ ID NO: 692 - DNA, 56 bp, synthetic construct
  misc_feature 1..56: note = Description of Artificial Sequence: Syntheticoligonucleotide
  source 1..56: mol_type = other DNA
ctttcaagactaatagattgctccttacgaggagacaatgtcggatggatgaaacc

SEQ ID NO: 693 - DNA, 56 bp, synthetic construct
  misc_feature 1..56: note = Description of Artificial Sequence: Syntheticoligonucleotide
  source 1..56: mol_type = other DNA
ctttcaagactaatagattgctccttacgaggagaccatccatccgacattgaagt

SEQ ID NO: 694 - DNA, 56 bp, synthetic construct
  misc_feature 1..56: note = Description of Artificial Sequence: Syntheticoligonucleotide
  source 1..56: mol_type = other DNA
ctttcaagactaatagattgctccttacgaggagacatccatccgacattgaagtt

SEQ ID NO: 695 - DNA, 56 bp, synthetic construct
  misc_feature 1..56: note = Description of Artificial Sequence: Syntheticoligonucleotide
  source 1..56: mol_type = other DNA
ctttcaagactaatagattgctccttacgaggagacagtaagtcaacttcaatgtc

SEQ ID NO: 696 - DNA, 56 bp, synthetic construct
  misc_feature 1..56: note = Description of Artificial Sequence: Syntheticoligonucleotide
  source 1..56: mol_type = other DNA
ctttcaagactaatagattgctccttacgaggagacttcagtaagtcaacttcaat

SEQ ID NO: 697 - DNA, 56 bp, synthetic construct
  misc_feature 1..56: note = Description of Artificial Sequence: Syntheticoligonucleotide
  source 1..56: mol_type = other DNA
ctttcaagactaatagattgctccttacgaggagacaagttgacttactgaagaat

SEQ ID NO: 698 - DNA, 56 bp, synthetic construct
  misc_feature 1..56: note = Description of Artificial Sequence: Syntheticoligonucleotide
  source 1..56: mol_type = other DNA
ctttcaagactaatagattgctccttacgaggagacacttactgaagaatggagag

SEQ ID NO: 699 - DNA, 56 bp, synthetic construct
  misc_feature 1..56: note = Description of Artificial Sequence: Syntheticoligonucleotide
  source 1..56: mol_type = other DNA
ctttcaagactaatagattgctccttacgaggagactctctccattcttcagtaag

SEQ ID NO: 700 - DNA, 56 bp, synthetic construct
  misc_feature 1..56: note = Description of Artificial Sequence: Syntheticoligonucleotide
  source 1..56: mol_type = other DNA
ctttcaagactaatagattgctccttacgaggagacctgaagaatggagagagaat

SEQ ID NO: 701 - DNA, 56 bp, synthetic construct
  misc_feature 1..56: note = Description of Artificial Sequence: Syntheticoligonucleotide
  source 1..56: mol_type = other DNA
ctttcaagactaatagattgctccttacgaggagacaattctctctccattcttca

SEQ ID NO: 702 - DNA, 56 bp, synthetic construct
  misc_feature 1..56: note = Description of Artificial Sequence: Syntheticoligonucleotide
  source 1..56: mol_type = other DNA
ctttcaagactaatagattgctccttacgaggagaccaattctctctccattcttc

SEQ ID NO: 703 - DNA, 56 bp, synthetic construct
  misc_feature 1..56: note = Description of Artificial Sequence: Syntheticoligonucleotide
  source 1..56: mol_type = other DNA
ctttcaagactaatagattgctccttacgaggagactcaattctctctccattctt

SEQ ID NO: 704 - DNA, 56 bp, synthetic construct
  misc_feature 1..56: note = Description of Artificial Sequence: Syntheticoligonucleotide
  source 1..56: mol_type = other DNA
ctttcaagactaatagattgctccttacgaggagacttcaattctctctccattct

SEQ ID NO: 705 - DNA, 56 bp, synthetic construct
  misc_feature 1..56: note = Description of Artificial Sequence: Syntheticoligonucleotide
  source 1..56: mol_type = other DNA
ctttcaagactaatagattgctccttacgaggagacaaaaagtggagcattcagac

SEQ ID NO: 706 - DNA, 56 bp, synthetic construct
  misc_feature 1..56: note = Description of Artificial Sequence: Syntheticoligonucleotide
  source 1..56: mol_type = other DNA
ctttcaagactaatagattgctccttacgaggagacctgaaagacaagtctgaatg

SEQ ID NO: 707 - DNA, 56 bp, synthetic construct
  misc_feature 1..56: note = Description of Artificial Sequence: Syntheticoligonucleotide
  source 1..56: mol_type = other DNA
ctttcaagactaatagattgctccttacgaggagacagacttgtctttcagcaagg

SEQ ID NO: 708 - DNA, 56 bp, synthetic construct
  misc_feature 1..56: note = Description of Artificial Sequence: Syntheticoligonucleotide
  source 1..56: mol_type = other DNA
ctttcaagactaatagattgctccttacgaggagactctttcagcaaggactggtc

SEQ ID NO: 709 - DNA, 56 bp, synthetic construct
  misc_feature 1..56: note = Description of Artificial Sequence: Syntheticoligonucleotide
  source 1..56: mol_type = other DNA
ctttcaagactaatagattgctccttacgaggagaccagcaaggactggtctttct

SEQ ID NO: 710 - DNA, 56 bp, synthetic construct
  misc_feature 1..56: note = Description of Artificial Sequence: Syntheticoligonucleotide
  source 1..56: mol_type = other DNA
ctttcaagactaatagattgctccttacgaggagacagcaaggactggtctttcta

SEQ ID NO: 711 - DNA, 56 bp, synthetic construct
  misc_feature 1..56: note = Description of Artificial Sequence: Syntheticoligonucleotide
  source 1..56: mol_type = other DNA
ctttcaagactaatagattgctccttacgaggagacctatctcttgtactacactg

SEQ ID NO: 712 - DNA, 56 bp, synthetic construct
  misc_feature 1..56: note = Description of Artificial Sequence: Syntheticoligonucleotide
  source 1..56: mol_type = other DNA
ctttcaagactaatagattgctccttacgaggagactatctcttgtactacactga

SEQ ID NO: 713 - DNA, 56 bp, synthetic construct
  misc_feature 1..56: note = Description of Artificial Sequence: Syntheticoligonucleotide
  source 1..56: mol_type = other DNA
ctttcaagactaatagattgctccttacgaggagacagtgtagtacaagagataga

SEQ ID NO: 714 - DNA, 56 bp, synthetic construct
  misc_feature 1..56: note = Description of Artificial Sequence: Syntheticoligonucleotide
  source 1..56: mol_type = other DNA
ctttcaagactaatagattgctccttacgaggagactactacactgaattcacccc

SEQ ID NO: 715 - DNA, 56 bp, synthetic construct
  misc_feature 1..56: note = Description of Artificial Sequence: Syntheticoligonucleotide
  source 1..56: mol_type = other DNA
ctttcaagactaatagattgctccttacgaggagacagtgggggtgaattcagtgt

SEQ ID NO: 716 - DNA, 56 bp, synthetic construct
  misc_feature 1..56: note = Description of Artificial Sequence: Syntheticoligonucleotide
  source 1..56: mol_type = other DNA
ctttcaagactaatagattgctccttacgaggagaccagtgggggtgaattcagtg

SEQ ID NO: 717 - DNA, 56 bp, synthetic construct
  misc_feature 1..56: note = Description of Artificial Sequence: Syntheticoligonucleotide
  source 1..56: mol_type = other DNA
ctttcaagactaatagattgctccttacgaggagactcagtgggggtgaattcagt

SEQ ID NO: 718 - DNA, 56 bp, synthetic construct
  misc_feature 1..56: note = Description of Artificial Sequence: Syntheticoligonucleotide
  source 1..56: mol_type = other DNA
ctttcaagactaatagattgctccttacgaggagacttcagtgggggtgaattcag

SEQ ID NO: 719 - DNA, 56 bp, synthetic construct
  misc_feature 1..56: note = Description of Artificial Sequence: Syntheticoligonucleotide
  source 1..56: mol_type = other DNA
ctttcaagactaatagattgctccttacgaggagacacccccactgaaaaagatga

SEQ ID NO: 720 - DNA, 56 bp, synthetic construct
  misc_feature 1..56: note = Description of Artificial Sequence: Syntheticoligonucleotide
  source 1..56: mol_type = other DNA
ctttcaagactaatagattgctccttacgaggagacacacggcaggcatactcatc

SEQ ID NO: 721 - DNA, 56 bp, synthetic construct
  misc_feature 1..56: note = Description of Artificial Sequence: Syntheticoligonucleotide
  source 1..56: mol_type = other DNA
ctttcaagactaatagattgctccttacgaggagacggctgtgacaaagtcacatg

SEQ ID NO: 722 - DNA, 56 bp, synthetic construct
  misc_feature 1..56: note = Description of Artificial Sequence: Syntheticoligonucleotide
  source 1..56: mol_type = other DNA
ctttcaagactaatagattgctccttacgaggagacgtcacagcccaagatagtta

SEQ ID NO: 723 - DNA, 56 bp, synthetic construct
  misc_feature 1..56: note = Description of Artificial Sequence: Syntheticoligonucleotide
  source 1..56: mol_type = other DNA
ctttcaagactaatagattgctccttacgaggagactcacagcccaagatagttaa

SEQ ID NO: 724 - DNA, 56 bp, synthetic construct
  misc_feature 1..56: note = Description of Artificial Sequence: Syntheticoligonucleotide
  source 1..56: mol_type = other DNA
ctttcaagactaatagattgctccttacgaggagacactatcttgggctgtgacaa

SEQ ID NO: 725 - DNA, 56 bp, synthetic construct
  misc_feature 1..56: note = Description of Artificial Sequence: Syntheticoligonucleotide
  source 1..56: mol_type = other DNA
ctttcaagactaatagattgctccttacgaggagacccccacttaactatcttggg

SEQ ID NO: 726 - DNA, 57 bp, synthetic construct
  misc_feature 1..57: note = Description of Artificial Sequence: Syntheticoligonucleotide
  source 1..57: mol_type = other DNA
gctggggaccgatcctgattgctcgctgcggcgagacaatataagtggaggcgtcgc

SEQ ID NO: 727 - DNA, 57 bp, synthetic construct
  misc_feature 1..57: note = Description of Artificial Sequence: Syntheticoligonucleotide
  source 1..57: mol_type = other DNA
gctggggaccgatcctgattgctcgctgcggcgagacatataagtggaggcgtcgcg

SEQ ID NO: 728 - DNA, 57 bp, synthetic construct
  misc_feature 1..57: note = Description of Artificial Sequence: Syntheticoligonucleotide
  source 1..57: mol_type = other DNA
gctggggaccgatcctgattgctcgctgcggcgagacaggaatgcccgccagcgcga

SEQ ID NO: 729 - DNA, 57 bp, synthetic construct
  misc_feature 1..57: note = Description of Artificial Sequence: Syntheticoligonucleotide
  source 1..57: mol_type = other DNA
gctggggaccgatcctgattgctcgctgcggcgagacctgaagctgacagcattcgg

SEQ ID NO: 730 - DNA, 57 bp, synthetic construct
  misc_feature 1..57: note = Description of Artificial Sequence: Syntheticoligonucleotide
  source 1..57: mol_type = other DNA
gctggggaccgatcctgattgctcgctgcggcgagacgggccgagatgtctcgctcc

SEQ ID NO: 731 - DNA, 57 bp, synthetic construct
  misc_feature 1..57: note = Description of Artificial Sequence: Syntheticoligonucleotide
  source 1..57: mol_type = other DNA
gctggggaccgatcctgattgctcgctgcggcgagacgctgtgctcgcgctactctc

SEQ ID NO: 732 - DNA, 57 bp, synthetic construct
  misc_feature 1..57: note = Description of Artificial Sequence: Syntheticoligonucleotide
  source 1..57: mol_type = other DNA
gctggggaccgatcctgattgctcgctgcggcgagacctggcctggaggctatccag

SEQ ID NO: 733 - DNA, 57 bp, synthetic construct
  misc_feature 1..57: note = Description of Artificial Sequence: Syntheticoligonucleotide
  source 1..57: mol_type = other DNA
gctggggaccgatcctgattgctcgctgcggcgagactggcctggaggctatccagc

SEQ ID NO: 734 - DNA, 57 bp, synthetic construct
  misc_feature 1..57: note = Description of Artificial Sequence: Syntheticoligonucleotide
  source 1..57: mol_type = other DNA
gctggggaccgatcctgattgctcgctgcggcgagacatgtgtcttttcccgatatt

SEQ ID NO: 735 - DNA, 57 bp, synthetic construct
  misc_feature 1..57: note = Description of Artificial Sequence: Syntheticoligonucleotide
  source 1..57: mol_type = other DNA
gctggggaccgatcctgattgctcgctgcggcgagactcccgatattcctcaggtac

SEQ ID NO: 736 - DNA, 57 bp, synthetic construct
  misc_feature 1..57: note = Description of Artificial Sequence: Syntheticoligonucleotide
  source 1..57: mol_type = other DNA
gctggggaccgatcctgattgctcgctgcggcgagaccccgatattcctcaggtact

SEQ ID NO: 737 - DNA, 57 bp, synthetic construct
  misc_feature 1..57: note = Description of Artificial Sequence: Syntheticoligonucleotide
  source 1..57: mol_type = other DNA
gctggggaccgatcctgattgctcgctgcggcgagacccgatattcctcaggtactc

SEQ ID NO: 738 - DNA, 57 bp, synthetic construct
  misc_feature 1..57: note = Description of Artificial Sequence: Syntheticoligonucleotide
  source 1..57: mol_type = other DNA
gctggggaccgatcctgattgctcgctgcggcgagacgagtacctgaggaatatcgg

SEQ ID NO: 739 - DNA, 57 bp, synthetic construct
  misc_feature 1..57: note = Description of Artificial Sequence: Syntheticoligonucleotide
  source 1..57: mol_type = other DNA
gctggggaccgatcctgattgctcgctgcggcgagacggagtacctgaggaatatcg

SEQ ID NO: 740 - DNA, 57 bp, synthetic construct
  misc_feature 1..57: note = Description of Artificial Sequence: Syntheticoligonucleotide
  source 1..57: mol_type = other DNA
gctggggaccgatcctgattgctcgctgcggcgagacctcaggtactccaaagattc

SEQ ID NO: 741 - DNA, 57 bp, synthetic construct
  misc_feature 1..57: note = Description of Artificial Sequence: Syntheticoligonucleotide
  source 1..57: mol_type = other DNA
gctggggaccgatcctgattgctcgctgcggcgagacaggtttactcacgtcatcca

SEQ ID NO: 742 - DNA, 57 bp, synthetic construct
  misc_feature 1..57: note = Description of Artificial Sequence: Syntheticoligonucleotide
  source 1..57: mol_type = other DNA
gctggggaccgatcctgattgctcgctgcggcgagacactcacgtcatccagcagag

SEQ ID NO: 743 - DNA, 57 bp, synthetic construct
  misc_feature 1..57: note = Description of Artificial Sequence: Syntheticoligonucleotide
  source 1..57: mol_type = other DNA
gctggggaccgatcctgattgctcgctgcggcgagacctcacgtcatccagcagaga

SEQ ID NO: 744 - DNA, 57 bp, synthetic construct
  misc_feature 1..57: note = Description of Artificial Sequence: Syntheticoligonucleotide
  source 1..57: mol_type = other DNA
gctggggaccgatcctgattgctcgctgcggcgagactctgctggatgacgtgagta

SEQ ID NO: 745 - DNA, 57 bp, synthetic construct
  misc_feature 1..57: note = Description of Artificial Sequence: Syntheticoligonucleotide
  source 1..57: mol_type = other DNA
gctggggaccgatcctgattgctcgctgcggcgagaccattctctgctggatgacgt

SEQ ID NO: 746 - DNA, 57 bp, synthetic construct
  misc_feature 1..57: note = Description of Artificial Sequence: Syntheticoligonucleotide
  source 1..57: mol_type = other DNA
gctggggaccgatcctgattgctcgctgcggcgagacccattctctgctggatgacg

SEQ ID NO: 747 - DNA, 57 bp, synthetic construct
  misc_feature 1..57: note = Description of Artificial Sequence: Syntheticoligonucleotide
  source 1..57: mol_type = other DNA
gctggggaccgatcctgattgctcgctgcggcgagacactttccattctctgctgga

SEQ ID NO: 748 - DNA, 57 bp, synthetic construct
  misc_feature 1..57: note = Description of Artificial Sequence: Syntheticoligonucleotide
  source 1..57: mol_type = other DNA
gctggggaccgatcctgattgctcgctgcggcgagacgactttccattctctgctgg

SEQ ID NO: 749 - DNA, 57 bp, synthetic construct
  misc_feature 1..57: note = Description of Artificial Sequence: Syntheticoligonucleotide
  source 1..57: mol_type = other DNA
gctggggaccgatcctgattgctcgctgcggcgagacaggaaatttgactttccatt

SEQ ID NO: 750 - DNA, 57 bp, synthetic construct
  misc_feature 1..57: note = Description of Artificial Sequence: Syntheticoligonucleotide
  source 1..57: mol_type = other DNA
gctggggaccgatcctgattgctcgctgcggcgagaccctgaattgctatgtgtctg

SEQ ID NO: 751 - DNA, 57 bp, synthetic construct
  misc_feature 1..57: note = Description of Artificial Sequence: Syntheticoligonucleotide
  source 1..57: mol_type = other DNA
gctggggaccgatcctgattgctcgctgcggcgagacctgaattgctatgtgtctgg

SEQ ID NO: 752 - DNA, 57 bp, synthetic construct
  misc_feature 1..57: note = Description of Artificial Sequence: Syntheticoligonucleotide
  source 1..57: mol_type = other DNA
gctggggaccgatcctgattgctcgctgcggcgagacctatgtgtctgggtttcatc

SEQ ID NO: 753 - DNA, 57 bp, synthetic construct
  misc_feature 1..57: note = Description of Artificial Sequence: Syntheticoligonucleotide
  source 1..57: mol_type = other DNA
gctggggaccgatcctgattgctcgctgcggcgagacaatgtcggatggatgaaacc

SEQ ID NO: 754 - DNA, 57 bp, synthetic construct
  misc_feature 1..57: note = Description of Artificial Sequence: Syntheticoligonucleotide
  source 1..57: mol_type = other DNA
gctggggaccgatcctgattgctcgctgcggcgagaccatccatccgacattgaagt

SEQ ID NO: 755 - DNA, 57 bp, synthetic construct
  misc_feature 1..57: note = Description of Artificial Sequence: Syntheticoligonucleotide
  source 1..57: mol_type = other DNA
gctggggaccgatcctgattgctcgctgcggcgagacatccatccgacattgaagtt

SEQ ID NO: 756 - DNA, 57 bp, synthetic construct
  misc_feature 1..57: note = Description of Artificial Sequence: Syntheticoligonucleotide
  source 1..57: mol_type = other DNA
gctggggaccgatcctgattgctcgctgcggcgagacagtaagtcaacttcaatgtc

SEQ ID NO: 757 - DNA, 57 bp, synthetic construct
  misc_feature 1..57: note = Description of Artificial Sequence: Syntheticoligonucleotide
  source 1..57: mol_type = other DNA
gctggggaccgatcctgattgctcgctgcggcgagacttcagtaagtcaacttcaat

SEQ ID NO: 758 - DNA, 57 bp, synthetic construct
  misc_feature 1..57: note = Description of Artificial Sequence: Syntheticoligonucleotide
  source 1..57: mol_type = other DNA
gctggggaccgatcctgattgctcgctgcggcgagacaagttgacttactgaagaat

SEQ ID NO: 759 - DNA, 57 bp, synthetic construct
  misc_feature 1..57: note = Description of Artificial Sequence: Syntheticoligonucleotide
  source 1..57: mol_type = other DNA
gctggggaccgatcctgattgctcgctgcggcgagacacttactgaagaatggagag

SEQ ID NO: 760 - DNA, 57 bp, synthetic construct
  misc_feature 1..57: note = Description of Artificial Sequence: Syntheticoligonucleotide
  source 1..57: mol_type = other DNA
gctggggaccgatcctgattgctcgctgcggcgagactctctccattcttcagtaag

SEQ ID NO: 761 - DNA, 57 bp, synthetic construct
  misc_feature 1..57: note = Description of Artificial Sequence: Syntheticoligonucleotide
  source 1..57: mol_type = other DNA
gctggggaccgatcctgattgctcgctgcggcgagacctgaagaatggagagagaat

SEQ ID NO: 762 - DNA, 57 bp, synthetic construct
  misc_feature 1..57: note = Description of Artificial Sequence: Syntheticoligonucleotide
  source 1..57: mol_type = other DNA
gctggggaccgatcctgattgctcgctgcggcgagacaattctctctccattcttca

SEQ ID NO: 763 - DNA, 57 bp, synthetic construct
  misc_feature 1..57: note = Description of Artificial Sequence: Syntheticoligonucleotide
  source 1..57: mol_type = other DNA
gctggggaccgatcctgattgctcgctgcggcgagaccaattctctctccattcttc

SEQ ID NO: 764 - DNA, 57 bp, synthetic construct
  misc_feature 1..57: note = Description of Artificial Sequence: Syntheticoligonucleotide
  source 1..57: mol_type = other DNA
gctggggaccgatcctgattgctcgctgcggcgagactcaattctctctccattctt

SEQ ID NO: 765 - DNA, 57 bp, synthetic construct
  misc_feature 1..57: note = Description of Artificial Sequence: Syntheticoligonucleotide
  source 1..57: mol_type = other DNA
gctggggaccgatcctgattgctcgctgcggcgagacttcaattctctctccattct

SEQ ID NO: 766 - DNA, 57 bp, synthetic construct
  misc_feature 1..57: note = Description of Artificial Sequence: Syntheticoligonucleotide
  source 1..57: mol_type = other DNA
gctggggaccgatcctgattgctcgctgcggcgagacaaaaagtggagcattcagac

SEQ ID NO: 767 - DNA, 57 bp, synthetic construct
  misc_feature 1..57: note = Description of Artificial Sequence: Syntheticoligonucleotide
  source 1..57: mol_type = other DNA
gctggggaccgatcctgattgctcgctgcggcgagacctgaaagacaagtctgaatg

SEQ ID NO: 768 - DNA, 57 bp, synthetic construct
  misc_feature 1..57: note = Description of Artificial Sequence: Syntheticoligonucleotide
  source 1..57: mol_type = other DNA
gctggggaccgatcctgattgctcgctgcggcgagacagacttgtctttcagcaagg

SEQ ID NO: 769 - DNA, 57 bp, synthetic construct
  misc_feature 1..57: note = Description of Artificial Sequence: Syntheticoligonucleotide
  source 1..57: mol_type = other DNA
gctggggaccgatcctgattgctcgctgcggcgagactctttcagcaaggactggtc

SEQ ID NO: 770 - DNA, 57 bp, synthetic construct
  misc_feature 1..57: note = Description of Artificial Sequence: Syntheticoligonucleotide
  source 1..57: mol_type = other DNA
gctggggaccgatcctgattgctcgctgcggcgagaccagcaaggactggtctttct

SEQ ID NO: 771 - DNA, 57 bp, synthetic construct
  misc_feature 1..57: note = Description of Artificial Sequence: Syntheticoligonucleotide
  source 1..57: mol_type = other DNA
gctggggaccgatcctgattgctcgctgcggcgagacagcaaggactggtctttcta

SEQ ID NO: 772 - DNA, 57 bp, synthetic construct
  misc_feature 1..57: note = Description of Artificial Sequence: Syntheticoligonucleotide
  source 1..57: mol_type = other DNA
gctggggaccgatcctgattgctcgctgcggcgagacctatctcttgtactacactg

SEQ ID NO: 773 - DNA, 57 bp, synthetic construct
  misc_feature 1..57: note = Description of Artificial Sequence: Syntheticoligonucleotide
  source 1..57: mol_type = other DNA
gctggggaccgatcctgattgctcgctgcggcgagactatctcttgtactacactga

SEQ ID NO: 774 - DNA, 57 bp, synthetic construct
  misc_feature 1..57: note = Description of Artificial Sequence: Syntheticoligonucleotide
  source 1..57: mol_type = other DNA
gctggggaccgatcctgattgctcgctgcggcgagacagtgtagtacaagagataga

SEQ ID NO: 775 - DNA, 57 bp, synthetic construct
  misc_feature 1..57: note = Description of Artificial Sequence: Syntheticoligonucleotide
  source 1..57: mol_type = other DNA
gctggggaccgatcctgattgctcgctgcggcgagactactacactgaattcacccc

SEQ ID NO: 776 - DNA, 57 bp, synthetic construct
  misc_feature 1..57: note = Description of Artificial Sequence: Syntheticoligonucleotide
  source 1..57: mol_type = other DNA
gctggggaccgatcctgattgctcgctgcggcgagacagtgggggtgaattcagtgt

SEQ ID NO: 777 - DNA, 57 bp, synthetic construct
  misc_feature 1..57: note = Description of Artificial Sequence: Syntheticoligonucleotide
  source 1..57: mol_type = other DNA
gctggggaccgatcctgattgctcgctgcggcgagaccagtgggggtgaattcagtg

SEQ ID NO: 778 - DNA, 57 bp, synthetic construct
  misc_feature 1..57: note = Description of Artificial Sequence: Syntheticoligonucleotide
  source 1..57: mol_type = other DNA
gctggggaccgatcctgattgctcgctgcggcgagactcagtgggggtgaattcagt

SEQ ID NO: 779 - DNA, 57 bp, synthetic construct
  misc_feature 1..57: note = Description of Artificial Sequence: Syntheticoligonucleotide
  source 1..57: mol_type = other DNA
gctggggaccgatcctgattgctcgctgcggcgagacttcagtgggggtgaattcag

SEQ ID NO: 780 - DNA, 57 bp, synthetic construct
  misc_feature 1..57: note = Description of Artificial Sequence: Syntheticoligonucleotide
  source 1..57: mol_type = other DNA
gctggggaccgatcctgattgctcgctgcggcgagacacccccactgaaaaagatga

SEQ ID NO: 781 - DNA, 57 bp, synthetic construct
  misc_feature 1..57: note = Description of Artificial Sequence: Syntheticoligonucleotide
  source 1..57: mol_type = other DNA
gctggggaccgatcctgattgctcgctgcggcgagacacacggcaggcatactcatc

SEQ ID NO: 782 - DNA, 57 bp, synthetic construct
  misc_feature 1..57: note = Description of Artificial Sequence: Syntheticoligonucleotide
  source 1..57: mol_type = other DNA
gctggggaccgatcctgattgctcgctgcggcgagacggctgtgacaaagtcacatg

SEQ ID NO: 783 - DNA, 57 bp, synthetic construct
  misc_feature 1..57: note = Description of Artificial Sequence: Syntheticoligonucleotide
  source 1..57: mol_type = other DNA
gctggggaccgatcctgattgctcgctgcggcgagacgtcacagcccaagatagtta

SEQ ID NO: 784 - DNA, 57 bp, synthetic construct
  misc_feature 1..57: note = Description of Artificial Sequence: Syntheticoligonucleotide
  source 1..57: mol_type = other DNA
gctggggaccgatcctgattgctcgctgcggcgagactcacagcccaagatagttaa

SEQ ID NO: 785 - DNA, 57 bp, synthetic construct
  misc_feature 1..57: note = Description of Artificial Sequence: Syntheticoligonucleotide
  source 1..57: mol_type = other DNA
gctggggaccgatcctgattgctcgctgcggcgagacactatcttgggctgtgacaa

SEQ ID NO: 786 - DNA, 57 bp, synthetic construct
  misc_feature 1..57: note = Description of Artificial Sequence: Syntheticoligonucleotide
  source 1..57: mol_type = other DNA
gctggggaccgatcctgattgctcgctgcggcgagacccccacttaactatcttggg

SEQ ID NO: 787 - RNA, 56 nt, synthetic construct
  misc_feature 1..56: note = Description of Artificial Sequence: Syntheticoligonucleotide
  source 1..56: mol_type = other RNA
ctttcaagactaatagattgctccttacgaggagacccttccgctcacctccgcct

SEQ ID NO: 788 - RNA, 56 nt, synthetic construct; identical to SEQ ID NO: 787
  misc_feature 1..56: note = Description of Artificial Sequence: Syntheticoligonucleotide
  source 1..56: mol_type = other RNA

SEQ ID NO: 789 - RNA, 56 nt, synthetic construct
  misc_feature 1..56: note = Description of Artificial Sequence: Syntheticoligonucleotide
  source 1..56: mol_type = other RNA
ctttcaagactaatagattgctccttacgaggagaccgctcacctccgcctgagca

SEQ ID NO: 790 - RNA, 56 nt, synthetic construct
  misc_feature 1..56: note = Description of Artificial Sequence: Syntheticoligonucleotide
  source 1..56: mol_type = other RNA
ctttcaagactaatagattgctccttacgaggagactccactgctcaggcggaggt

SEQ ID NO: 791 - RNA, 56 nt, synthetic construct
  misc_feature 1..56: note = Description of Artificial Sequence: Syntheticoligonucleotide
  source 1..56: mol_type = other RNA
ctttcaagactaatagattgctccttacgaggagactagcaccgcccagacgactg

SEQ ID NO: 792 - RNA, 56 nt, synthetic construct
  misc_feature 1..56: note = Description of Artificial Sequence: Syntheticoligonucleotide
  source 1..56: mol_type = other RNA
ctttcaagactaatagattgctccttacgaggagacaggcatgcagatcccacagg

SEQ ID NO: 793 - RNA, 56 nt, synthetic construct
  misc_feature 1..56: note = Description of Artificial Sequence: Syntheticoligonucleotide
  source 1..56: mol_type = other RNA
ctttcaagactaatagattgctccttacgaggagaccacaggcgccctggccagtc

SEQ ID NO: 794 - RNA, 56 nt, synthetic construct
  misc_feature 1..56: note = Description of Artificial Sequence: Syntheticoligonucleotide
  source 1..56: mol_type = other RNA
ctttcaagactaatagattgctccttacgaggagactctgggcggtgctacaactg

SEQ ID NO: 795 - RNA, 56 nt, synthetic construct
  misc_feature 1..56: note = Description of Artificial Sequence: Syntheticoligonucleotide
  source 1..56: mol_type = other RNA
ctttcaagactaatagattgctccttacgaggagacgcatgcctggagcagcccca

SEQ ID NO: 796 - RNA, 56 nt, synthetic construct; identical to SEQ ID NO: 791
  misc_feature 1..56: note = Description of Artificial Sequence: Syntheticoligonucleotide
  source 1..56: mol_type = other RNA

SEQ ID NO: 797 - RNA, 56 nt, synthetic construct
  misc_feature 1..56: note = Description of Artificial Sequence: Syntheticoligonucleotide
  source 1..56: mol_type = other RNA
ctttcaagactaatagattgctccttacgaggagactggccgccagcccagttgta

SEQ ID NO: 798 - RNA, 56 nt, synthetic construct
  misc_feature 1..56: note = Description of Artificial Sequence: Syntheticoligonucleotide
  source 1..56: mol_type = other RNA
ctttcaagactaatagattgctccttacgaggagaccttccgctcacctccgcctg

SEQ ID NO: 799 - RNA, 56 nt, synthetic construct
  misc_feature 1..56: note = Description of Artificial Sequence: Syntheticoligonucleotide
  source 1..56: mol_type = other RNA
ctttcaagactaatagattgctccttacgaggagaccagggcctgtctggggagtc

SEQ ID NO: 800 - RNA, 56 nt, synthetic construct
  misc_feature 1..56: note = Description of Artificial Sequence: Syntheticoligonucleotide
  source 1..56: mol_type = other RNA
ctttcaagactaatagattgctccttacgaggagactccccagccctgctcgtggt

SEQ ID NO: 801 - RNA, 56 nt, synthetic construct
  misc_feature 1..56: note = Description of Artificial Sequence: Syntheticoligonucleotide
  source 1..56: mol_type = other RNA
ctttcaagactaatagattgctccttacgaggagacggtcaccacgagcagggctg

SEQ ID NO: 802 - RNA, 56 nt, synthetic construct
  misc_feature 1..56: note = Description of Artificial Sequence: Syntheticoligonucleotide
  source 1..56: mol_type = other RNA
ctttcaagactaatagattgctccttacgaggagactccccttcggtcaccacgag

SEQ ID NO: 803 - RNA, 56 nt, synthetic construct
  misc_feature 1..56: note = Description of Artificial Sequence: Syntheticoligonucleotide
  source 1..56: mol_type = other RNA
ctttcaagactaatagattgctccttacgaggagacgagaagctgcaggtgaaggt

SEQ ID NO: 804 - RNA, 56 nt, synthetic construct
  misc_feature 1..56: note = Description of Artificial Sequence: Syntheticoligonucleotide
  source 1..56: mol_type = other RNA
ctttcaagactaatagattgctccttacgaggagacacctgcagcttctccaacac

SEQ ID NO: 805 - RNA, 56 nt, synthetic construct
  misc_feature 1..56: note = Description of Artificial Sequence: Syntheticoligonucleotide
  source 1..56: mol_type = other RNA
ctttcaagactaatagattgctccttacgaggagactccaacacatcggagagctt

SEQ ID NO: 806 - RNA, 56 nt, synthetic construct
  misc_feature 1..56: note = Description of Artificial Sequence: Syntheticoligonucleotide
  source 1..56: mol_type = other RNA
ctttcaagactaatagattgctccttacgaggagacgcacgaagctctccgatgtg

SEQ ID NO: 807 - RNA, 56 nt, synthetic construct
  misc_feature 1..56: note = Description of Artificial Sequence: Syntheticoligonucleotide
  source 1..56: mol_type = other RNA
ctttcaagactaatagattgctccttacgaggagacagcacgaagctctccgatgt

SEQ ID NO: 808 - RNA, 56 nt, synthetic construct
  misc_feature 1..56: note = Description of Artificial Sequence: Syntheticoligonucleotide
  source 1..56: mol_type = other RNA
ctttcaagactaatagattgctccttacgaggagacgtgctaaactggtaccgcat

SEQ ID NO: 809 - RNA, 56 nt, synthetic construct
  misc_feature 1..56: note = Description of Artificial Sequence: Syntheticoligonucleotide
  source 1..56: mol_type = other RNA
ctttcaagactaatagattgctccttacgaggagacctggggctcatgcggtacca

SEQ ID NO: 810 - RNA, 56 nt, synthetic construct
  misc_feature 1..56: note = Description of Artificial Sequence: Syntheticoligonucleotide
  source 1..56: mol_type = other RNA
ctttcaagactaatagattgctccttacgaggagactccgtctggttgctggggct

SEQ ID NO: 811 - RNA, 56 nt, synthetic construct
  misc_feature 1..56: note = Description of Artificial Sequence: Syntheticoligonucleotide
  source 1..56: mol_type = other RNA
ctttcaagactaatagattgctccttacgaggagaccccgaggaccgcagccagcc

SEQ ID NO: 812 - RNA, 56 nt, synthetic construct
  misc_feature 1..56: note = Description of Artificial Sequence: Syntheticoligonucleotide
  source 1..56: mol_type = other RNA
ctttcaagactaatagattgctccttacgaggagactgtgacacggaagcggcagt

SEQ ID NO: 813 - RNA, 56 nt, synthetic construct
  misc_feature 1..56: note = Description of Artificial Sequence: Syntheticoligonucleotide
  source 1..56: mol_type = other RNA
ctttcaagactaatagattgctccttacgaggagaccgtgtcacacaactgcccaa

SEQ ID NO: 814 - RNA, 56 nt, synthetic construct
  misc_feature 1..56: note = Description of Artificial Sequence: Syntheticoligonucleotide
  source 1..56: mol_type = other RNA
ctttcaagactaatagattgctccttacgaggagacggcagttgtgtgacacggaa

SEQ ID NO: 815 - RNA, 56 nt, synthetic construct
  misc_feature 1..56: note = Description of Artificial Sequence: Syntheticoligonucleotide
  source 1..56: mol_type = other RNA
ctttcaagactaatagattgctccttacgaggagaccacatgagcgtggtcagggc

SEQ ID NO: 816 - RNA, 56 nt, synthetic construct
  misc_feature 1..56: note = Description of Artificial Sequence: Syntheticoligonucleotide
  source 1..56: mol_type = other RNA
ctttcaagactaatagattgctccttacgaggagaccgccgggccctgaccacgct

SEQ ID NO: 817 - RNA, 56 nt, synthetic construct
  misc_feature 1..56: note = Description of Artificial Sequence: Syntheticoligonucleotide
  source 1..56: mol_type = other RNA
ctttcaagactaatagattgctccttacgaggagacggggccagggagatggcccc

SEQ ID NO: 818 - RNA, 56 nt, synthetic construct
  misc_feature 1..56: note = Description of Artificial Sequence: Syntheticoligonucleotide
  source 1..56: mol_type = other RNA
ctttcaagactaatagattgctccttacgaggagacatctgcgccttgggggccag

SEQ ID NO: 819 - RNA, 56 nt, synthetic construct
  misc_feature 1..56: note = Description of Artificial Sequence: Syntheticoligonucleotide
  source 1..56: mol_type = other RNA
ctttcaagactaatagattgctccttacgaggagacgatctgcgccttgggggcca

SEQ ID NO: 820 - RNA, 56 nt, synthetic construct
  misc_feature 1..56: note = Description of Artificial Sequence: Syntheticoligonucleotide
  source 1..56: mol_type = other RNA
ctttcaagactaatagattgctccttacgaggagacccagacaggccctggaaccc

SEQ ID NO: 821 - RNA, 56 nt, synthetic construct
  misc_feature 1..56: note = Description of Artificial Sequence: Syntheticoligonucleotide
  source 1..56: mol_type = other RNA
ctttcaagactaatagattgctccttacgaggagacccagccctgctcgtggtgac

SEQ ID NO: 822 - RNA, 56 nt, synthetic construct
  misc_feature 1..56: note = Description of Artificial Sequence: Syntheticoligonucleotide
  source 1..56: mol_type = other RNA
ctttcaagactaatagattgctccttacgaggagactctctggaagggcacaaagg

SEQ ID NO: 823 - RNA, 56 nt, synthetic construct
  misc_feature 1..56: note = Description of Artificial Sequence: Syntheticoligonucleotide
  source 1..56: mol_type = other RNA
ctttcaagactaatagattgctccttacgaggagacgtgcccttccagagagaagg

SEQ ID NO: 824 - RNA, 56 nt, synthetic construct
  misc_feature 1..56: note = Description of Artificial Sequence: Syntheticoligonucleotide
  source 1..56: mol_type = other RNA
ctttcaagactaatagattgctccttacgaggagactgcccttccagagagaaggg

SEQ ID NO: 825 - RNA, 56 nt, synthetic construct
  misc_feature 1..56: note = Description of Artificial Sequence: Syntheticoligonucleotide
  source 1..56: mol_type = other RNA
ctttcaagactaatagattgctccttacgaggagactgcccttctctctggaaggg

SEQ ID NO: 826 - RNA, 56 nt, synthetic construct
  misc_feature 1..56: note = Description of Artificial Sequence: Syntheticoligonucleotide
  source 1..56: mol_type = other RNA
ctttcaagactaatagattgctccttacgaggagaccagagagaagggcagaagtg

SEQ ID NO: 827 - RNA, 56 nt, synthetic construct
  misc_feature 1..56: note = Description of Artificial Sequence: Syntheticoligonucleotide
  source 1..56: mol_type = other RNA
ctttcaagactaatagattgctccttacgaggagacgaactggccggctggcctgg

SEQ ID NO: 828 - RNA, 56 nt, synthetic construct
  misc_feature 1..56: note = Description of Artificial Sequence: Syntheticoligonucleotide
  source 1..56: mol_type = other RNA
ctttcaagactaatagattgctccttacgaggagacggaactggccggctggcctg

SEQ ID NO: 829 - RNA, 56 nt, synthetic construct
  misc_feature 1..56: note = Description of Artificial Sequence: Syntheticoligonucleotide
  source 1..56: mol_type = other RNA
ctttcaagactaatagattgctccttacgaggagaccaaaccctggtggttggtgt

SEQ ID NO: 830 - RNA, 56 nt, synthetic construct
  misc_feature 1..56: note = Description of Artificial Sequence: Syntheticoligonucleotide
  source 1..56: mol_type = other RNA
ctttcaagactaatagattgctccttacgaggagacgtgtcgtgggcggcctgctg

SEQ ID NO: 831 - RNA, 56 nt, synthetic construct
  misc_feature 1..56: note = Description of Artificial Sequence: Syntheticoligonucleotide
  source 1..56: mol_type = other RNA
ctttcaagactaatagattgctccttacgaggagaccctcgtgcggcccgggagca

SEQ ID NO: 832 - RNA, 56 nt, synthetic construct
  misc_feature 1..56: note = Description of Artificial Sequence: Syntheticoligonucleotide
  source 1..56: mol_type = other RNA
ctttcaagactaatagattgctccttacgaggagactccctgcagagaaacacact

SEQ ID NO: 833 - RNA, 56 nt, synthetic construct
  misc_feature 1..56: note = Description of Artificial Sequence: Syntheticoligonucleotide
  source 1..56: mol_type = other RNA
ctttcaagactaatagattgctccttacgaggagacctctgcagggacaataggag

SEQ ID NO: 834 - RNA, 56 nt, synthetic construct
  misc_feature 1..56: note = Description of Artificial Sequence: Syntheticoligonucleotide
  source 1..56: mol_type = other RNA
ctttcaagactaatagattgctccttacgaggagactctgcagggacaataggagc

SEQ ID NO: 835 - RNA, 56 nt, synthetic construct
  misc_feature 1..56: note = Description of Artificial Sequence: Syntheticoligonucleotide
  source 1..56: mol_type = other RNA
ctttcaagactaatagattgctccttacgaggagacctcctcaaagaaggaggacc

SEQ ID NO: 836 - RNA, 56 nt, synthetic construct
  misc_feature 1..56: note = Description of Artificial Sequence: Syntheticoligonucleotide
  source 1..56: mol_type = other RNA
ctttcaagactaatagattgctccttacgaggagactcctcaaagaaggaggaccc

SEQ ID NO: 837 - RNA, 56 nt, synthetic construct
  misc_feature 1..56: note = Description of Artificial Sequence: Syntheticoligonucleotide
  source 1..56: mol_type = other RNA
ctttcaagactaatagattgctccttacgaggagactctgtggactatggggagct

SEQ ID NO: 838 - RNA, 56 nt, synthetic construct
  misc_feature 1..56: note = Description of Artificial Sequence: Syntheticoligonucleotide
  source 1..56: mol_type = other RNA
ctttcaagactaatagattgctccttacgaggagactctcgccactggaaatccag

SEQ ID NO: 839 - RNA, 56 nt, synthetic construct
  misc_feature 1..56: note = Description of Artificial Sequence: Syntheticoligonucleotide
  source 1..56: mol_type = other RNA
ctttcaagactaatagattgctccttacgaggagacccagtggcgagagaagaccc

SEQ ID NO: 840 - RNA, 56 nt, synthetic construct
  misc_feature 1..56: note = Description of Artificial Sequence: Syntheticoligonucleotide
  source 1..56: mol_type = other RNA
ctttcaagactaatagattgctccttacgaggagaccagtggcgagagaagacccc

SEQ ID NO: 841 - RNA, 56 nt, synthetic construct
  misc_feature 1..56: note = Description of Artificial Sequence: Syntheticoligonucleotide
  source 1..56: mol_type = other RNA
ctttcaagactaatagattgctccttacgaggagaccgctaggaaagacaatggtg

SEQ ID NO: 842 - RNA, 56 nt, synthetic construct
  misc_feature 1..56: note = Description of Artificial Sequence: Syntheticoligonucleotide
  source 1..56: mol_type = other RNA
ctttcaagactaatagattgctccttacgaggagactctttcctagcggaatgggc

SEQ ID NO: 843 - RNA, 56 nt, synthetic construct
  misc_feature 1..56: note = Description of Artificial Sequence: Syntheticoligonucleotide
  source 1..56: mol_type = other RNA
ctttcaagactaatagattgctccttacgaggagaccctagcggaatgggcacctc

SEQ ID NO: 844 - RNA, 56 nt, synthetic construct
  misc_feature 1..56: note = Description of Artificial Sequence: Syntheticoligonucleotide
  source 1..56: mol_type = other RNA
ctttcaagactaatagattgctccttacgaggagacctagcggaatgggcacctca

SEQ ID NO: 845 - RNA, 56 nt, synthetic construct
  misc_feature 1..56: note = Description of Artificial Sequence: Syntheticoligonucleotide
  source 1..56: mol_type = other RNA
ctttcaagactaatagattgctccttacgaggagacgcccctctgaccggcttcct

SEQ ID NO: 846 - RNA, 56 nt, synthetic construct
  misc_feature 1..56: note = Description of Artificial Sequence: Syntheticoligonucleotide
  source 1..56: mol_type = other RNA
ctttcaagactaatagattgctccttacgaggagaccttggccaccagtgttctgc

SEQ ID NO: 847 - RNA, 56 nt, synthetic construct
  misc_feature 1..56: note = Description of Artificial Sequence: Syntheticoligonucleotide
  source 1..56: mol_type = other RNA
ctttcaagactaatagattgctccttacgaggagacgccaccagtgttctgcagac

SEQ ID NO: 848 - RNA, 56 nt, synthetic construct
  misc_feature 1..56: note = Description of Artificial Sequence: Syntheticoligonucleotide
  source 1..56: mol_type = other RNA
ctttcaagactaatagattgctccttacgaggagactgcagaccctccaccatgag

SEQ ID NO: 849 - RNA, 56 nt, synthetic construct
  misc_feature 1..56: note = Description of Artificial Sequence: Syntheticoligonucleotide
  source 1..56: mol_type = other RNA
ctttcaagactaatagattgctccttacgaggagactcctgaggaaatgcgctgac

SEQ ID NO: 850 - RNA, 56 nt, synthetic construct
  misc_feature 1..56: note = Description of Artificial Sequence: Syntheticoligonucleotide
  source 1..56: mol_type = other RNA
ctttcaagactaatagattgctccttacgaggagaccctcaggagaagcaggcagg

SEQ ID NO: 851 - RNA, 56 nt, synthetic construct
  misc_feature 1..56: note = Description of Artificial Sequence: Syntheticoligonucleotide
  source 1..56: mol_type = other RNA
ctttcaagactaatagattgctccttacgaggagacctcaggagaagcaggcaggg

SEQ ID NO: 852 - RNA, 56 nt, synthetic construct
  misc_feature 1..56: note = Description of Artificial Sequence: Syntheticoligonucleotide
  source 1..56: mol_type = other RNA
ctttcaagactaatagattgctccttacgaggagaccaggccgtccaggggctgag

SEQ ID NO: 853 - RNA, 56 nt, synthetic construct
  misc_feature 1..56: note = Description of Artificial Sequence: Syntheticoligonucleotide
  source 1..56: mol_type = other RNA
ctttcaagactaatagattgctccttacgaggagacagacatgagtcctgtggtgg

SEQ ID NO: 854 - RNA, 56 nt, synthetic construct
  misc_feature 1..56: note = Description of Artificial Sequence: Syntheticoligonucleotide
  source 1..56: mol_type = other RNA
ctttcaagactaatagattgctccttacgaggagacaggtcctgccagcacagagc

SEQ ID NO: 855 - RNA, 56 nt, synthetic construct
  misc_feature 1..56: note = Description of Artificial Sequence: Syntheticoligonucleotide
  source 1..56: mol_type = other RNA
ctttcaagactaatagattgctccttacgaggagacagggagctggacgcaggcag

SEQ ID NO: 856 - RNA, 56 nt, synthetic construct
  misc_feature 1..56: note = Description of Artificial Sequence: Syntheticoligonucleotide
  source 1..56: mol_type = other RNA
ctttcaagactaatagattgctccttacgaggagacagccccgggccgcaggcagc

SEQ ID NO: 857 - RNA, 56 nt, synthetic construct
  misc_feature 1..56: note = Description of Artificial Sequence: Syntheticoligonucleotide
  source 1..56: mol_type = other RNA
ctttcaagactaatagattgctccttacgaggagacaggcaggaggctccggggcg

SEQ ID NO: 858 - RNA, 56 nt, synthetic construct
  misc_feature 1..56: note = Description of Artificial Sequence: Syntheticoligonucleotide
  source 1..56: mol_type = other RNA
ctttcaagactaatagattgctccttacgaggagacggggctggttggagatggcc

SEQ ID NO: 859 - RNA, 56 nt, synthetic construct
  misc_feature 1..56: note = Description of Artificial Sequence: Syntheticoligonucleotide
  source 1..56: mol_type = other RNA
ctttcaagactaatagattgctccttacgaggagacgagatggccttggagcagcc

SEQ ID NO: 860 - RNA, 56 nt, synthetic construct
  misc_feature 1..56: note = Description of Artificial Sequence: Syntheticoligonucleotide
  source 1..56: mol_type = other RNA
ctttcaagactaatagattgctccttacgaggagacgctgctccaaggccatctcc

SEQ ID NO: 861 - RNA, 56 nt, synthetic construct
  misc_feature 1..56: note = Description of Artificial Sequence: Syntheticoligonucleotide
  source 1..56: mol_type = other RNA
ctttcaagactaatagattgctccttacgaggagacgagcagccaaggtgcccctg

SEQ ID NO: 862 - RNA, 56 nt, synthetic construct
  misc_feature 1..56: note = Description of Artificial Sequence: Syntheticoligonucleotide
  source 1..56: mol_type = other RNA
ctttcaagactaatagattgctccttacgaggagacgggatgccactgccaggggc

SEQ ID NO: 863 - RNA, 56 nt, synthetic construct
  misc_feature 1..56: note = Description of Artificial Sequence: Syntheticoligonucleotide
  source 1..56: mol_type = other RNA
ctttcaagactaatagattgctccttacgaggagaccgggatgccactgccagggg

SEQ ID NO: 864 - RNA, 56 nt, synthetic construct
  misc_feature 1..56: note = Description of Artificial Sequence: Syntheticoligonucleotide
  source 1..56: mol_type = other RNA
ctttcaagactaatagattgctccttacgaggagacggccctgcgtccagggcgtt

SEQ ID NO: 865 - RNA, 56 nt, synthetic construct
  misc_feature 1..56: note = Description of Artificial Sequence: Syntheticoligonucleotide
  source 1..56: mol_type = other RNA
ctttcaagactaatagattgctccttacgaggagactctgctccctgcaggcctag

SEQ ID NO: 866 - RNA, 56 nt, synthetic construct
  misc_feature 1..56: note = Description of Artificial Sequence: Syntheticoligonucleotide
  source 1..56: mol_type = other RNA
ctttcaagactaatagattgctccttacgaggagactctaggcctgcagggagcag

SEQ ID NO: 867 - RNA, 56 nt, synthetic construct
  misc_feature 1..56: note = Description of Artificial Sequence: Syntheticoligonucleotide
  source 1..56: mol_type = other RNA
ctttcaagactaatagattgctccttacgaggagaccctgaaacttctctaggcct

SEQ ID NO: 868 - RNA, 56 nt, synthetic construct
  misc_feature 1..56: note = Description of Artificial Sequence: Syntheticoligonucleotide
  source 1..56: mol_type = other RNA
ctttcaagactaatagattgctccttacgaggagactgaccttccctgaaacttct

SEQ ID NO: 869 - RNA, 56 nt, synthetic construct
  misc_feature 1..56: note = Description of Artificial Sequence: Syntheticoligonucleotide
  source 1..56: mol_type = other RNA
ctttcaagactaatagattgctccttacgaggagaccagggaaggtcagaagagct

SEQ ID NO: 870 - RNA, 56 nt, synthetic construct
  misc_feature 1..56: note = Description of Artificial Sequence: Syntheticoligonucleotide
  source 1..56: mol_type = other RNA
ctttcaagactaatagattgctccttacgaggagacagggaaggtcagaagagctc

SEQ ID NO: 871 - RNA, 56 nt, synthetic construct
  misc_feature 1..56: note = Description of Artificial Sequence: Syntheticoligonucleotide
  source 1..56: mol_type = other RNA
ctttcaagactaatagattgctccttacgaggagacctgccctgcccaccacagcc

SEQ ID NO: 872 - RNA, 56 nt, synthetic construct
  misc_feature 1..56: note = Description of Artificial Sequence: Syntheticoligonucleotide
  source 1..56: mol_type = other RNA
ctttcaagactaatagattgctccttacgaggagaccctgccctgcccaccacagc

SEQ ID NO: 873 - RNA, 56 nt, synthetic construct
  misc_feature 1..56: note = Description of Artificial Sequence: Syntheticoligonucleotide
  source 1..56: mol_type = other RNA
ctttcaagactaatagattgctccttacgaggagacacacatgcccaggcagcacc

SEQ ID NO: 874 - RNA, 56 nt, synthetic construct
  misc_feature 1..56: note = Description of Artificial Sequence: Syntheticoligonucleotide
  source 1..56: mol_type = other RNA
ctttcaagactaatagattgctccttacgaggagaccacatgcccaggcagcacct

SEQ ID NO: 875 - RNA, 56 nt, synthetic construct
  misc_feature 1..56: note = Description of Artificial Sequence: Syntheticoligonucleotide
  source 1..56: mol_type = other RNA
ctttcaagactaatagattgctccttacgaggagaccctgccccacaaagggcctg

SEQ ID NO: 876 - RNA, 56 nt, synthetic construct
  misc_feature 1..56: note = Description of Artificial Sequence: Syntheticoligonucleotide
  source 1..56: mol_type = other RNA
ctttcaagactaatagattgctccttacgaggagacgtggggcagggaagctgagg

SEQ ID NO: 877 - RNA, 56 nt, synthetic construct
  misc_feature 1..56: note = Description of Artificial Sequence: Syntheticoligonucleotide
  source 1..56: mol_type = other RNA
ctttcaagactaatagattgctccttacgaggagactggggcagggaagctgaggc

SEQ ID NO: 878 - RNA, 56 nt, synthetic construct
  misc_feature 1..56: note = Description of Artificial Sequence: Syntheticoligonucleotide
  source 1..56: mol_type = other RNA
ctttcaagactaatagattgctccttacgaggagacctgcctcagcttccctgccc

SEQ ID NO: 879 - RNA, 56 nt, synthetic construct
  misc_feature 1..56: note = Description of Artificial Sequence: Syntheticoligonucleotide
  source 1..56: mol_type = other RNA
ctttcaagactaatagattgctccttacgaggagaccaggcccagccagcactctg

SEQ ID NO: 880 - RNA, 56 nt, synthetic construct
  misc_feature 1..56: note = Description of Artificial Sequence: Syntheticoligonucleotide
  source 1..56: mol_type = other RNA
ctttcaagactaatagattgctccttacgaggagacaggcccagccagcactctgg

SEQ ID NO: 881 - RNA, 56 nt, synthetic construct
  misc_feature 1..56: note = Description of Artificial Sequence: Syntheticoligonucleotide
  source 1..56: mol_type = other RNA
ctttcaagactaatagattgctccttacgaggagaccaccccagcccctcacacca

SEQ ID NO: 882 - RNA, 56 nt, synthetic construct
  misc_feature 1..56: note = Description of Artificial Sequence: Syntheticoligonucleotide
  source 1..56: mol_type = other RNA
ctttcaagactaatagattgctccttacgaggagacggaccgtaggatgtccctct

SEQ ID NO: 883 - RNA, 57 nt, synthetic construct
  misc_feature 1..57: note = Description of Artificial Sequence: Syntheticoligonucleotide
  source 1..57: mol_type = other RNA
gctggggaccgatcctgattgctcgctgcggcgagacccttccgctcacctccgcct

SEQ ID NO: 884 - RNA, 57 nt, synthetic construct; identical to SEQ ID NO: 883
  misc_feature 1..57: note = Description of Artificial Sequence: Syntheticoligonucleotide
  source 1..57: mol_type = other RNA

SEQ ID NO: 885 - RNA, 57 nt, synthetic construct
  misc_feature 1..57: note = Description of Artificial Sequence: Syntheticoligonucleotide
  source 1..57: mol_type = other RNA
gctggggaccgatcctgattgctcgctgcggcgagaccgctcacctccgcctgagca

SEQ ID NO: 886 - RNA, 57 nt, synthetic construct
  misc_feature 1..57: note = Description of Artificial Sequence: Syntheticoligonucleotide
  source 1..57: mol_type = other RNA
gctggggaccgatcctgattgctcgctgcggcgagactccactgctcaggcggaggt

SEQ ID NO: 887 - RNA, 57 nt, synthetic construct
  misc_feature 1..57: note = Description of Artificial Sequence: Syntheticoligonucleotide
  source 1..57: mol_type = other RNA
gctggggaccgatcctgattgctcgctgcggcgagactagcaccgcccagacgactg

SEQ ID NO: 888 - RNA, 57 nt, synthetic construct
  misc_feature 1..57: note = Description of Artificial Sequence: Syntheticoligonucleotide
  source 1..57: mol_type = other RNA
gctggggaccgatcctgattgctcgctgcggcgagacaggcatgcagatcccacagg

SEQ ID NO: 889 - RNA, 57 nt, synthetic construct
  misc_feature 1..57: note = Description of Artificial Sequence: Syntheticoligonucleotide
  source 1..57: mol_type = other RNA
gctggggaccgatcctgattgctcgctgcggcgagaccacaggcgccctggccagtc

SEQ ID NO: 890 - RNA, 57 nt, synthetic construct
  misc_feature 1..57: note = Description of Artificial Sequence: Syntheticoligonucleotide
  source 1..57: mol_type = other RNA
gctggggaccgatcctgattgctcgctgcggcgagactctgggcggtgctacaactg

SEQ ID NO: 891 - RNA, 57 nt, synthetic construct
  misc_feature 1..57: note = Description of Artificial Sequence: Syntheticoligonucleotide
  source 1..57: mol_type = other RNA
gctggggaccgatcctgattgctcgctgcggcgagacgcatgcctggagcagcccca

SEQ ID NO: 892 - RNA, 57 nt, synthetic construct; identical to SEQ ID NO: 887
  misc_feature 1..57: note = Description of Artificial Sequence: Syntheticoligonucleotide
  source 1..57: mol_type = other RNA

SEQ ID NO: 893 - RNA, 57 nt, synthetic construct
  misc_feature 1..57: note = Description of Artificial Sequence: Syntheticoligonucleotide
  source 1..57: mol_type = other RNA
gctggggaccgatcctgattgctcgctgcggcgagactggccgccagcccagttgta

SEQ ID NO: 894 - RNA, 57 nt, synthetic construct
  misc_feature 1..57: note = Description of Artificial Sequence: Syntheticoligonucleotide
  source 1..57: mol_type = other RNA
gctggggaccgatcctgattgctcgctgcggcgagaccttccgctcacctccgcctg

SEQ ID NO: 895 - RNA, 57 nt, synthetic construct
  misc_feature 1..57: note = Description of Artificial Sequence: Syntheticoligonucleotide
  source 1..57: mol_type = other RNA
gctggggaccgatcctgattgctcgctgcggcgagaccagggcctgtctggggagtc

SEQ ID NO: 896 - RNA, 57 nt, synthetic construct
  misc_feature 1..57: note = Description of Artificial Sequence: Syntheticoligonucleotide
  source 1..57: mol_type = other RNA
gctggggaccgatcctgattgctcgctgcggcgagactccccagccctgctcgtggt

SEQ ID NO: 897 - RNA, 57 nt, synthetic construct
  misc_feature 1..57: note = Description of Artificial Sequence: Syntheticoligonucleotide
  source 1..57: mol_type = other RNA
gctggggaccgatcctgattgctcgctgcggcgagacggtcaccacgagcagggctg

SEQ ID NO: 898 - RNA, 57 nt, synthetic construct
  misc_feature 1..57: note = Description of Artificial Sequence: Syntheticoligonucleotide
  source 1..57: mol_type = other RNA
gctggggaccgatcctgattgctcgctgcggcgagactccccttcggtcaccacgag

SEQ ID NO: 899 - RNA, 57 nt, synthetic construct
  misc_feature 1..57: note = Description of Artificial Sequence: Syntheticoligonucleotide
  source 1..57: mol_type = other RNA
gctggggaccgatcctgattgctcgctgcggcgagacgagaagctgcaggtgaaggt

SEQ ID NO: 900 - RNA, 57 nt, synthetic construct
  misc_feature 1..57: note = Description of Artificial Sequence: Syntheticoligonucleotide
  source 1..57: mol_type = other RNA
gctggggaccgatcctgattgctcgctgcggcgagacacctgcagcttctccaacac

SEQ ID NO: 901 - RNA, 57 nt, synthetic construct
  misc_feature 1..57: note = Description of Artificial Sequence: Syntheticoligonucleotide
  source 1..57: mol_type = other RNA
gctggggaccgatcctgattgctcgctgcggcgagactccaacacatcggagagctt

SEQ ID NO: 902 - RNA, 57 nt, synthetic construct
  misc_feature 1..57: note = Description of Artificial Sequence: Syntheticoligonucleotide
  source 1..57: mol_type = other RNA
gctggggaccgatcctgattgctcgctgcggcgagacgcacgaagctctccgatgtg

SEQ ID NO: 903 - RNA, 57 nt, synthetic construct
  misc_feature 1..57: note = Description of Artificial Sequence: Syntheticoligonucleotide
  source 1..57: mol_type = other RNA
gctggggaccgatcctgattgctcgctgcggcgagacagcacgaagctctccgatgt

SEQ ID NO: 904 - RNA, 57 nt, synthetic construct
  misc_feature 1..57: note = Description of Artificial Sequence: Syntheticoligonucleotide
  source 1..57: mol_type = other RNA
gctggggaccgatcctgattgctcgctgcggcgagacgtgctaaactggtaccgcat

SEQ ID NO: 905 - RNA, 57 nt, synthetic construct
  misc_feature 1..57: note = Description of Artificial Sequence: Syntheticoligonucleotide
  source 1..57: mol_type = other RNA
gctggggaccgatcctgattgctcgctgcggcgagacctggggctcatgcggtacca

SEQ ID NO: 906 - RNA, 57 nt, synthetic construct
  misc_feature 1..57: note = Description of Artificial Sequence: Syntheticoligonucleotide
  source 1..57: mol_type = other RNA
gctggggaccgatcctgattgctcgctgcggcgagactccgtctggttgctggggct

SEQ ID NO: 907 - RNA, 57 nt, synthetic construct
  misc_feature 1..57: note = Description of Artificial Sequence: Syntheticoligonucleotide
  source 1..57: mol_type = other RNA
gctggggaccgatcctgattgctcgctgcggcgagaccccgaggaccgcagccagcc

SEQ ID NO: 908 - RNA, 57 nt, synthetic construct
  misc_feature 1..57: note = Description of Artificial Sequence: Syntheticoligonucleotide
  source 1..57: mol_type = other RNA
gctggggaccgatcctgattgctcgctgcggcgagactgtgacacggaagcggcagt

SEQ ID NO: 909 - RNA, 57 nt, synthetic construct
  misc_feature 1..57: note = Description of Artificial Sequence: Syntheticoligonucleotide
  source 1..57: mol_type = other RNA
gctggggaccgatcctgattgctcgctgcggcgagaccgtgtcacacaactgcccaa

SEQ ID NO: 910 - RNA, 57 nt, synthetic construct
  misc_feature 1..57: note = Description of Artificial Sequence: Syntheticoligonucleotide
  source 1..57: mol_type = other RNA
gctggggaccgatcctgattgctcgctgcggcgagacggcagttgtgtgacacggaa

SEQ ID NO: 911 - RNA, 57 nt, synthetic construct
  misc_feature 1..57: note = Description of Artificial Sequence: Syntheticoligonucleotide
  source 1..57: mol_type = other RNA
gctggggaccgatcctgattgctcgctgcggcgagaccacatgagcgtggtcagggc

SEQ ID NO: 912 - RNA, 57 nt, synthetic construct
  misc_feature 1..57: note = Description of Artificial Sequence: Syntheticoligonucleotide
  source 1..57: mol_type = other RNA
gctggggaccgatcctgattgctcgctgcggcgagaccgccgggccctgaccacgct

SEQ ID NO: 913 - RNA, 57 nt, synthetic construct
  misc_feature 1..57: note = Description of Artificial Sequence: Syntheticoligonucleotide
  source 1..57: mol_type = other RNA
gctggggaccgatcctgattgctcgctgcggcgagacggggccagggagatggcccc

SEQ ID NO: 914 - RNA, 57 nt, synthetic construct
  misc_feature 1..57: note = Description of Artificial Sequence: Syntheticoligonucleotide
  source 1..57: mol_type = other RNA
gctggggaccgatcctgattgctcgctgcggcgagacatctgcgccttgggggccag

SEQ ID NO: 915 - RNA, 57 nt, synthetic construct
  misc_feature 1..57: note = Description of Artificial Sequence: Syntheticoligonucleotide
  source 1..57: mol_type = other RNA
gctggggaccgatcctgattgctcgctgcggcgagacgatctgcgccttgggggcca

SEQ ID NO: 916 - RNA, 57 nt, synthetic construct
  misc_feature 1..57: note = Description of Artificial Sequence: Syntheticoligonucleotide
  source 1..57: mol_type = other RNA
gctggggaccgatcctgattgctcgctgcggcgagacccagacaggccctggaaccc

SEQ ID NO: 917 - RNA, 57 nt, synthetic construct
  misc_feature 1..57: note = Description of Artificial Sequence: Syntheticoligonucleotide
  source 1..57: mol_type = other RNA
gctggggaccgatcctgattgctcgctgcggcgagacccagccctgctcgtggtgac

SEQ ID NO: 918 - RNA, 57 nt, synthetic construct
  misc_feature 1..57: note = Description of Artificial Sequence: Syntheticoligonucleotide
  source 1..57: mol_type = other RNA
gctggggaccgatcctgattgctcgctgcggcgagactctctggaagggcacaaagg

SEQ ID NO: 919 - RNA, 57 nt, synthetic construct
  misc_feature 1..57: note = Description of Artificial Sequence: Syntheticoligonucleotide
  source 1..57: mol_type = other RNA
gctggggaccgatcctgattgctcgctgcggcgagacgtgcccttccagagagaagg

SEQ ID NO: 920 - RNA, 57 nt, synthetic construct
  misc_feature 1..57: note = Description of Artificial Sequence: Syntheticoligonucleotide
  source 1..57: mol_type = other RNA
gctggggaccgatcctgattgctcgctgcggcgagactgcccttccagagagaaggg

SEQ ID NO: 921 - RNA, 57 nt, synthetic construct
  misc_feature 1..57: note = Description of Artificial Sequence: Syntheticoligonucleotide
  source 1..57: mol_type = other RNA
gctggggaccgatcctgattgctcgctgcggcgagactgcccttctctctggaaggg

SEQ ID NO: 922 - RNA, 57 nt, synthetic construct
  misc_feature 1..57: note = Description of Artificial Sequence: Syntheticoligonucleotide
  source 1..57: mol_type = other RNA
gctggggaccgatcctgattgctcgctgcggcgagaccagagagaagggcagaagtg

SEQ ID NO: 923 - RNA, 57 nt, synthetic construct
  misc_feature 1..57: note = Description of Artificial Sequence: Syntheticoligonucleotide
  source 1..57: mol_type = other RNA
gctggggaccgatcctgattgctcgctgcggcgagacgaactggccggctggcctgg

SEQ ID NO: 924 - RNA, 57 nt, synthetic construct
  misc_feature 1..57: note = Description of Artificial Sequence: Syntheticoligonucleotide
  source 1..57: mol_type = other RNA
gctggggaccgatcctgattgctcgctgcggcgagacggaactggccggctggcctg

SEQ ID NO: 925 - RNA, 57 nt, synthetic construct
  misc_feature 1..57: note = Description of Artificial Sequence: Syntheticoligonucleotide
  source 1..57: mol_type = other RNA
gctggggaccgatcctgattgctcgctgcggcgagaccaaaccctggtggttggtgt

SEQ ID NO: 926 - RNA, 57 nt, synthetic construct
  misc_feature 1..57: note = Description of Artificial Sequence: Syntheticoligonucleotide
  source 1..57: mol_type = other RNA
gctggggaccgatcctgattgctcgctgcggcgagacgtgtcgtgggcggcctgctg

SEQ ID NO: 927 - RNA, 57 nt, synthetic construct
  misc_feature 1..57: note = Description of Artificial Sequence: Syntheticoligonucleotide
  source 1..57: mol_type = other RNA
gctggggaccgatcctgattgctcgctgcggcgagaccctcgtgcggcccgggagca

SEQ ID NO: 928 - RNA, 57 nt, synthetic construct
  misc_feature 1..57: note = Description of Artificial Sequence: Syntheticoligonucleotide
  source 1..57: mol_type = other RNA
gctggggaccgatcctgattgctcgctgcggcgagactccctgcagagaaacacact

SEQ ID NO: 929 - RNA, 57 nt, synthetic construct
  misc_feature 1..57: note = Description of Artificial Sequence: Syntheticoligonucleotide
  source 1..57: mol_type = other RNA
gctggggaccgatcctgattgctcgctgcggcgagacctctgcagggacaataggag

SEQ ID NO: 930 - RNA, 57 nt, synthetic construct
  misc_feature 1..57: note = Description of Artificial Sequence: Syntheticoligonucleotide
  source 1..57: mol_type = other RNA
gctggggaccgatcctgattgctcgctgcggcgagactctgcagggacaataggagc

SEQ ID NO: 931 - RNA, 57 nt, synthetic construct
  misc_feature 1..57: note = Description of Artificial Sequence: Syntheticoligonucleotide
  source 1..57: mol_type = other RNA
gctggggaccgatcctgattgctcgctgcggcgagacctcctcaaagaaggaggacc

SEQ ID NO: 932 - RNA, 57 nt, synthetic construct
  misc_feature 1..57: note = Description of Artificial Sequence: Syntheticoligonucleotide
  source 1..57: mol_type = other RNA
gctggggaccgatcctgattgctcgctgcggcgagactcctcaaagaaggaggaccc

SEQ ID NO: 933 - RNA, 57 nt, synthetic construct
  misc_feature 1..57: note = Description of Artificial Sequence: Syntheticoligonucleotide
  source 1..57: mol_type = other RNA
gctggggaccgatcctgattgctcgctgcggcgagactctgtggactatggggagct

SEQ ID NO: 934 - RNA, 57 nt, synthetic construct
  misc_feature 1..57: note = Description of Artificial Sequence: Syntheticoligonucleotide
  source 1..57: mol_type = other RNA
gctggggaccgatcctgattgctcgctgcggcgagactctcgccactggaaatccag

SEQ ID NO: 935 - RNA, 57 nt, synthetic construct
  misc_feature 1..57: note = Description of Artificial Sequence: Syntheticoligonucleotide
  source 1..57: mol_type = other RNA
gctggggaccgatcctgattgctcgctgcggcgagacccagtggcgagagaagaccc

SEQ ID NO: 936 - RNA, 57 nt, synthetic construct
  misc_feature 1..57: note = Description of Artificial Sequence: Syntheticoligonucleotide
  source 1..57: mol_type = other RNA
gctggggaccgatcctgattgctcgctgcggcgagaccagtggcgagagaagacccc

SEQ ID NO: 937 - RNA, 57 nt, synthetic construct
  misc_feature 1..57: note = Description of Artificial Sequence: Syntheticoligonucleotide
  source 1..57: mol_type = other RNA
gctggggaccgatcctgattgctcgctgcggcgagaccgctaggaaagacaatggtg

SEQ ID NO: 938 - RNA, 57 nt, synthetic construct
  misc_feature 1..57: note = Description of Artificial Sequence: Syntheticoligonucleotide
  source 1..57: mol_type = other RNA
gctggggaccgatcctgattgctcgctgcggcgagactctttcctagcggaatgggc

SEQ ID NO: 939 - RNA, 57 nt, synthetic construct
  misc_feature 1..57: note = Description of Artificial Sequence: Syntheticoligonucleotide
  source 1..57: mol_type = other RNA
gctggggaccgatcctgattgctcgctgcggcgagaccctagcggaatgggcacctc

SEQ ID NO: 940 - RNA, 57 nt, synthetic construct
  misc_feature 1..57: note = Description of Artificial Sequence: Syntheticoligonucleotide
  source 1..57: mol_type = other RNA
gctggggaccgatcctgattgctcgctgcggcgagacctagcggaatgggcacctca

SEQ ID NO: 941 - RNA, 57 nt, synthetic construct
  misc_feature 1..57: note = Description of Artificial Sequence: Syntheticoligonucleotide
  source 1..57: mol_type = other RNA
gctggggaccgatcctgattgctcgctgcggcgagacgcccctctgaccggcttcct

SEQ ID NO: 942 - RNA, 57 nt, synthetic construct
  misc_feature 1..57: note = Description of Artificial Sequence: Syntheticoligonucleotide
  source 1..57: mol_type = other RNA
gctggggaccgatcctgattgctcgctgcggcgagaccttggccaccagtgttctgc

SEQ ID NO: 943 - RNA, 57 nt, synthetic construct
  misc_feature 1..57: note = Description of Artificial Sequence: Syntheticoligonucleotide
  source 1..57: mol_type = other RNA
gctggggaccgatcctgattgctcgctgcggcgagacgccaccagtgttctgcagac

SEQ ID NO: 944 - RNA, 57 nt, synthetic construct
  misc_feature 1..57: note = Description of Artificial Sequence: Syntheticoligonucleotide
  source 1..57: mol_type = other RNA
gctggggaccgatcctgattgctcgctgcggcgagactgcagaccctccaccatgag

SEQ ID NO: 945 - RNA, 57 nt, synthetic construct
  misc_feature 1..57: note = Description of Artificial Sequence: Syntheticoligonucleotide
  source 1..57: mol_type = other RNA
gctggggaccgatcctgattgctcgctgcggcgagactcctgaggaaatgcgctgac

SEQ ID NO: 946 - RNA, 57 nt, synthetic construct
  misc_feature 1..57: note = Description of Artificial Sequence: Syntheticoligonucleotide
  source 1..57: mol_type = other RNA
gctggggaccgatcctgattgctcgctgcggcgagaccctcaggagaagcaggcagg

SEQ ID NO: 947 - RNA, 57 nt, synthetic construct
  misc_feature 1..57: note = Description of Artificial Sequence: Syntheticoligonucleotide
  source 1..57: mol_type = other RNA
gctggggaccgatcctgattgctcgctgcggcgagacctcaggagaagcaggcaggg

SEQ ID NO: 948 - RNA, 57 nt, synthetic construct
  misc_feature 1..57: note = Description of Artificial Sequence: Syntheticoligonucleotide
  source 1..57: mol_type = other RNA
gctggggaccgatcctgattgctcgctgcggcgagaccaggccgtccaggggctgag

SEQ ID NO: 949 - RNA, 57 nt, synthetic construct
  misc_feature 1..57: note = Description of Artificial Sequence: Syntheticoligonucleotide
  source 1..57: mol_type = other RNA
gctggggaccgatcctgattgctcgctgcggcgagacagacatgagtcctgtggtgg

SEQ ID NO: 950 - RNA, 57 nt, synthetic construct
  misc_feature 1..57: note = Description of Artificial Sequence: Syntheticoligonucleotide
  source 1..57: mol_type = other RNA
gctggggaccgatcctgattgctcgctgcggcgagacaggtcctgccagcacagagc

SEQ ID NO: 951 - RNA, 57 nt, synthetic construct
  misc_feature 1..57: note = Description of Artificial Sequence: Syntheticoligonucleotide
  source 1..57: mol_type = other RNA
gctggggaccgatcctgattgctcgctgcggcgagacagggagctggacgcaggcag

SEQ ID NO: 952 - RNA, 57 nt, synthetic construct
  misc_feature 1..57: note = Description of Artificial Sequence: Syntheticoligonucleotide
  source 1..57: mol_type = other RNA
gctggggaccgatcctgattgctcgctgcggcgagacagccccgggccgcaggcagc

SEQ ID NO: 953 - RNA, 57 nt, synthetic construct
  misc_feature 1..57: note = Description of Artificial Sequence: Syntheticoligonucleotide
  source 1..57: mol_type = other RNA
gctggggaccgatcctgattgctcgctgcggcgagacaggcaggaggctccggggcg

SEQ ID NO: 954 - RNA, 57 nt, synthetic construct
  misc_feature 1..57: note = Description of Artificial Sequence: Syntheticoligonucleotide
  source 1..57: mol_type = other RNA
gctggggaccgatcctgattgctcgctgcggcgagacggggctggttggagatggcc

SEQ ID NO: 955 - RNA, 57 nt, synthetic construct
  misc_feature 1..57: note = Description of Artificial Sequence: Syntheticoligonucleotide
  source 1..57: mol_type = other RNA
gctggggaccgatcctgattgctcgctgcggcgagacgagatggccttggagcagcc

SEQ ID NO: 956 - RNA, 57 nt, synthetic construct
  misc_feature 1..57: note = Description of Artificial Sequence: Syntheticoligonucleotide
  source 1..57: mol_type = other RNA
gctggggaccgatcctgattgctcgctgcggcgagacgctgctccaaggccatctcc

SEQ ID NO: 957 - RNA, 57 nt, synthetic construct
  misc_feature 1..57: note = Description of Artificial Sequence: Syntheticoligonucleotide
  source 1..57: mol_type = other RNA
gctggggaccgatcctgattgctcgctgcggcgagacgagcagccaaggtgcccctg

SEQ ID NO: 958 - RNA, 57 nt, synthetic construct
  misc_feature 1..57: note = Description of Artificial Sequence: Syntheticoligonucleotide
  source 1..57: mol_type = other RNA
gctggggaccgatcctgattgctcgctgcggcgagacgggatgccactgccaggggc

SEQ ID NO: 959 - RNA, 57 nt, synthetic construct
  misc_feature 1..57: note = Description of Artificial Sequence: Syntheticoligonucleotide
  source 1..57: mol_type = other RNA
gctggggaccgatcctgattgctcgctgcggcgagaccgggatgccactgccagggg

SEQ ID NO: 960 - RNA, 57 nt, synthetic construct
  misc_feature 1..57: note = Description of Artificial Sequence: Syntheticoligonucleotide
  source 1..57: mol_type = other RNA
gctggggaccgatcctgattgctcgctgcggcgagacggccctgcgtccagggcgtt

SEQ ID NO: 961 - RNA, 57 nt, synthetic construct
  misc_feature 1..57: note = Description of Artificial Sequence: Syntheticoligonucleotide
  source 1..57: mol_type = other RNA
gctggggaccgatcctgattgctcgctgcggcgagactctgctccctgcaggcctag

SEQ ID NO: 962 - RNA, 57 nt, synthetic construct
  misc_feature 1..57: note = Description of Artificial Sequence: Syntheticoligonucleotide
  source 1..57: mol_type = other RNA
gctggggaccgatcctgattgctcgctgcggcgagactctaggcctgcagggagcag

SEQ ID NO: 963 - RNA, 57 nt, synthetic construct
  misc_feature 1..57: note = Description of Artificial Sequence: Syntheticoligonucleotide
  source 1..57: mol_type = other RNA
gctggggaccgatcctgattgctcgctgcggcgagaccctgaaacttctctaggcct

SEQ ID NO: 964 - RNA, 57 nt, synthetic construct
  misc_feature 1..57: note = Description of Artificial Sequence: Syntheticoligonucleotide
  source 1..57: mol_type = other RNA
gctggggaccgatcctgattgctcgctgcggcgagactgaccttccctgaaacttct

SEQ ID NO: 965 - RNA, 57 nt, synthetic construct
  misc_feature 1..57: note = Description of Artificial Sequence: Syntheticoligonucleotide
  source 1..57: mol_type = other RNA
gctggggaccgatcctgattgctcgctgcggcgagaccagggaaggtcagaagagct

SEQ ID NO: 966 - RNA, 57 nt, synthetic construct
  misc_feature 1..57: note = Description of Artificial Sequence: Syntheticoligonucleotide
  source 1..57: mol_type = other RNA
gctggggaccgatcctgattgctcgctgcggcgagacagggaaggtcagaagagctc

SEQ ID NO: 967 - RNA, 57 nt, synthetic construct
  misc_feature 1..57: note = Description of Artificial Sequence: Syntheticoligonucleotide
  source 1..57: mol_type = other RNA
gctggggaccgatcctgattgctcgctgcggcgagacctgccctgcccaccacagcc

SEQ ID NO: 968 - RNA, 57 nt, synthetic construct
  misc_feature 1..57: note = Description of Artificial Sequence: Syntheticoligonucleotide
  source 1..57: mol_type = other RNA
gctggggaccgatcctgattgctcgctgcggcgagaccctgccctgcccaccacagc

SEQ ID NO: 969 - RNA, 57 nt, synthetic construct
  misc_feature 1..57: note = Description of Artificial Sequence: Syntheticoligonucleotide
  source 1..57: mol_type = other RNA
gctggggaccgatcctgattgctcgctgcggcgagacacacatgcccaggcagcacc

SEQ ID NO: 970 - RNA, 57 nt, synthetic construct
  misc_feature 1..57: note = Description of Artificial Sequence: Syntheticoligonucleotide
  source 1..57: mol_type = other RNA
gctggggaccgatcctgattgctcgctgcggcgagaccacatgcccaggcagcacct

SEQ ID NO: 971 - RNA, 57 nt, synthetic construct
  misc_feature 1..57: note = Description of Artificial Sequence: Syntheticoligonucleotide
  source 1..57: mol_type = other RNA
gctggggaccgatcctgattgctcgctgcggcgagaccctgccccacaaagggcctg

SEQ ID NO: 972 - RNA, 57 nt, synthetic construct
  misc_feature 1..57: note = Description of Artificial Sequence: Syntheticoligonucleotide
  source 1..57: mol_type = other RNA
gctggggaccgatcctgattgctcgctgcggcgagacgtggggcagggaagctgagg

SEQ ID NO: 973 - RNA, 57 nt, synthetic construct
  misc_feature 1..57: note = Description of Artificial Sequence: Syntheticoligonucleotide
  source 1..57: mol_type = other RNA
gctggggaccgatcctgattgctcgctgcggcgagactggggcagggaagctgaggc

SEQ ID NO: 974 - RNA, 57 nt, synthetic construct
  misc_feature 1..57: note = Description of Artificial Sequence: Syntheticoligonucleotide
  source 1..57: mol_type = other RNA
gctggggaccgatcctgattgctcgctgcggcgagacctgcctcagcttccctgccc

SEQ ID NO: 975 - RNA, 57 nt, synthetic construct
  misc_feature 1..57: note = Description of Artificial Sequence: Syntheticoligonucleotide
  source 1..57: mol_type = other RNA
gctggggaccgatcctgattgctcgctgcggcgagaccaggcccagccagcactctg

SEQ ID NO: 976 - RNA, 57 nt, synthetic construct
  misc_feature 1..57: note = Description of Artificial Sequence: Syntheticoligonucleotide
  source 1..57: mol_type = other RNA
gctggggaccgatcctgattgctcgctgcggcgagacaggcccagccagcactctgg

SEQ ID NO: 977 - RNA, 57 nt, synthetic construct
  misc_feature 1..57: note = Description of Artificial Sequence: Syntheticoligonucleotide
  source 1..57: mol_type = other RNA
gctggggaccgatcctgattgctcgctgcggcgagaccaccccagcccctcacacca

SEQ ID NO: 978 - RNA, 57 nt, synthetic construct
  misc_feature 1..57: note = Description of Artificial Sequence: Syntheticoligonucleotide
  source 1..57: mol_type = other RNA
gctggggaccgatcctgattgctcgctgcggcgagacggaccgtaggatgtccctct

SEQ ID NO: 979 - RNA, 56 nt, synthetic construct
  misc_feature 1..56: note = Description of Artificial Sequence: Syntheticoligonucleotide
  source 1..56: mol_type = other RNA
ctttcaagactaatagattgctccttacgaggagacctacacaatgcgttgcctgg

SEQ ID NO: 980 - RNA, 56 nt, synthetic construct
  misc_feature 1..56: note = Description of Artificial Sequence: Syntheticoligonucleotide
  source 1..56: mol_type = other RNA
ctttcaagactaatagattgctccttacgaggagacgggctctgacaggtaggacc

SEQ ID NO: 981 - RNA, 56 nt, synthetic construct
  misc_feature 1..56: note = Description of Artificial Sequence: Syntheticoligonucleotide
  source 1..56: mol_type = other RNA
ctttcaagactaatagattgctccttacgaggagactgtaggaatcccagccaggc

SEQ ID NO: 982 - RNA, 56 nt, synthetic construct
  misc_feature 1..56: note = Description of Artificial Sequence: Syntheticoligonucleotide
  source 1..56: mol_type = other RNA
ctttcaagactaatagattgctccttacgaggagaccctggctccacgccctgctg

SEQ ID NO: 983 - RNA, 56 nt, synthetic construct
  misc_feature 1..56: note = Description of Artificial Sequence: Syntheticoligonucleotide
  source 1..56: mol_type = other RNA
ctttcaagactaatagattgctccttacgaggagacgggaagctgagggcacgagg

SEQ ID NO: 984 - RNA, 56 nt, synthetic construct
  misc_feature 1..56: note = Description of Artificial Sequence: Syntheticoligonucleotide
  source 1..56: mol_type = other RNA
ctttcaagactaatagattgctccttacgaggagacacagcgatgctgaccccctg

SEQ ID NO: 985 - RNA, 56 nt, synthetic construct
  misc_feature 1..56: note = Description of Artificial Sequence: Syntheticoligonucleotide
  source 1..56: mol_type = other RNA
ctttcaagactaatagattgctccttacgaggagacttaacagcgatgctgacccc

SEQ ID NO: 986 - RNA, 56 nt, synthetic construct
  misc_feature 1..56: note = Description of Artificial Sequence: Syntheticoligonucleotide
  source 1..56: mol_type = other RNA
ctttcaagactaatagattgctccttacgaggagactatgaccagatggacctggc

SEQ ID NO: 987 - RNA, 56 nt, synthetic construct
  misc_feature 1..56: note = Description of Artificial Sequence: Syntheticoligonucleotide
  source 1..56: mol_type = other RNA
ctttcaagactaatagattgctccttacgaggagacgggcccctagaaggtggcta

SEQ ID NO: 988 - RNA, 56 nt, synthetic construct
  misc_feature 1..56: note = Description of Artificial Sequence: Syntheticoligonucleotide
  source 1..56: mol_type = other RNA
ctttcaagactaatagattgctccttacgaggagactaggggccccaactccatgg

SEQ ID NO: 989 - RNA, 56 nt, synthetic construct
  misc_feature 1..56: note = Description of Artificial Sequence: Syntheticoligonucleotide
  source 1..56: mol_type = other RNA
ctttcaagactaatagattgctccttacgaggagacagaagctccaggtagccacc

SEQ ID NO: 990 - RNA, 56 nt, synthetic construct
  misc_feature 1..56: note = Description of Artificial Sequence: Syntheticoligonucleotide
  source 1..56: mol_type = other RNA
ctttcaagactaatagattgctccttacgaggagactccagccaggtccatctggt

SEQ ID NO: 991 - RNA, 56 nt, synthetic construct
  misc_feature 1..56: note = Description of Artificial Sequence: Syntheticoligonucleotide
  source 1..56: mol_type = other RNA
ctttcaagactaatagattgctccttacgaggagacttctccagccaggtccatct

SEQ ID NO: 992 - RNA, 57 nt, synthetic construct
  misc_feature 1..57: note = Description of Artificial Sequence: Syntheticoligonucleotide
  source 1..57: mol_type = other RNA
gctggggaccgatcctgattgctcgctgcggcgagacctacacaatgcgttgcctgg

SEQ ID NO: 993 - RNA, 57 nt, synthetic construct
  misc_feature 1..57: note = Description of Artificial Sequence: Syntheticoligonucleotide
  source 1..57: mol_type = other RNA
gctggggaccgatcctgattgctcgctgcggcgagacgggctctgacaggtaggacc

SEQ ID NO: 994 - RNA, 57 nt, synthetic construct
  misc_feature 1..57: note = Description of Artificial Sequence: Syntheticoligonucleotide
  source 1..57: mol_type = other RNA
gctggggaccgatcctgattgctcgctgcggcgagactgtaggaatcccagccaggc

SEQ ID NO: 995 - RNA, 57 nt, synthetic construct
  misc_feature 1..57: note = Description of Artificial Sequence: Syntheticoligonucleotide
  source 1..57: mol_type = other RNA
gctggggaccgatcctgattgctcgctgcggcgagaccctggctccacgccctgctg

SEQ ID NO: 996 - RNA, 57 nt, synthetic construct
  misc_feature 1..57: note = Description of Artificial Sequence: Syntheticoligonucleotide
  source 1..57: mol_type = other RNA
gctggggaccgatcctgattgctcgctgcggcgagacgggaagctgagggcacgagg

SEQ ID NO: 997 - RNA, 57 nt, synthetic construct
  misc_feature 1..57: note = Description of Artificial Sequence: Syntheticoligonucleotide
  source 1..57: mol_type = other RNA
gctggggaccgatcctgattgctcgctgcggcgagacacagcgatgctgaccccctg

SEQ ID NO: 998 - RNA, 57 nt, synthetic construct
  misc_feature 1..57: note = Description of Artificial Sequence: Syntheticoligonucleotide
  source 1..57: mol_type = other RNA
gctggggaccgatcctgattgctcgctgcggcgagacttaacagcgatgctgacccc

SEQ ID NO: 999 - RNA, 57 nt, synthetic construct
  misc_feature 1..57: note = Description of Artificial Sequence: Syntheticoligonucleotide
  source 1..57: mol_type = other RNA
gctggggaccgatcctgattgctcgctgcggcgagactatgaccagatggacctggc

SEQ ID NO: 1000 - RNA, 57 nt, synthetic construct
  misc_feature 1..57: note = Description of Artificial Sequence: Syntheticoligonucleotide
  source 1..57: mol_type = other RNA
gctggggaccgatcctgattgctcgctgcggcgagacgggcccctagaaggtggcta

SEQ ID NO: 1001 - RNA, 57 nt, synthetic construct
  misc_feature 1..57: note = Description of Artificial Sequence: Syntheticoligonucleotide
  source 1..57: mol_type = other RNA
gctggggaccgatcctgattgctcgctgcggcgagactaggggccccaactccatgg

SEQ ID NO: 1002 - RNA, 57 nt, synthetic construct
  misc_feature 1..57: note = Description of Artificial Sequence: Syntheticoligonucleotide
  source 1..57: mol_type = other RNA
gctggggaccgatcctgattgctcgctgcggcgagacagaagctccaggtagccacc

SEQ ID NO: 1003 - RNA, 57 nt, synthetic construct
  misc_feature 1..57: note = Description of Artificial Sequence: Syntheticoligonucleotide
  source 1..57: mol_type = other RNA
gctggggaccgatcctgattgctcgctgcggcgagactccagccaggtccatctggt

SEQ ID NO: 1004 - RNA, 57 nt, synthetic construct
  misc_feature 1..57: note = Description of Artificial Sequence: Syntheticoligonucleotide
  source 1..57: mol_type = other RNA
gctggggaccgatcctgattgctcgctgcggcgagacttctccagccaggtccatct

SEQ ID NO: 1005 - RNA, 56 nt, synthetic construct
  misc_feature 1..56: note = Description of Artificial Sequence: Syntheticoligonucleotide
  source 1..56: mol_type = other RNA
ctttcaagactaatagattgctccttacgaggagacccgctgttgccgccgctgct

SEQ ID NO: 1006 - RNA, 56 nt, synthetic construct
  misc_feature 1..56: note = Description of Artificial Sequence: Syntheticoligonucleotide
  source 1..56: mol_type = other RNA
ctttcaagactaatagattgctccttacgaggagacccgccgctgctgctgctgtt

SEQ ID NO: 1007 - RNA, 56 nt, synthetic construct
  misc_feature 1..56: note = Description of Artificial Sequence: Syntheticoligonucleotide
  source 1..56: mol_type = other RNA
ctttcaagactaatagattgctccttacgaggagacctgctactgtgccccaccgg

SEQ ID NO: 1008 - RNA, 56 nt, synthetic construct
  misc_feature 1..56: note = Description of Artificial Sequence: Syntheticoligonucleotide
  source 1..56: mol_type = other RNA
ctttcaagactaatagattgctccttacgaggagacataatctccatcctcgtcct

SEQ ID NO: 1009 - RNA, 56 nt, synthetic construct
  misc_feature 1..56: note = Description of Artificial Sequence: Syntheticoligonucleotide
  source 1..56: mol_type = other RNA
ctttcaagactaatagattgctccttacgaggagactgaagagctgatgctcgccc

SEQ ID NO: 1010 - RNA, 56 nt, synthetic construct
  misc_feature 1..56: note = Description of Artificial Sequence: Syntheticoligonucleotide
  source 1..56: mol_type = other RNA
ctttcaagactaatagattgctccttacgaggagacgagcaacggcggaaggtggc

SEQ ID NO: 1011 - RNA, 56 nt, synthetic construct
  misc_feature 1..56: note = Description of Artificial Sequence: Syntheticoligonucleotide
  source 1..56: mol_type = other RNA
ctttcaagactaatagattgctccttacgaggagacctggcagcctccaggcctcc

SEQ ID NO: 1012 - RNA, 56 nt, synthetic construct
  misc_feature 1..56: note = Description of Artificial Sequence: Syntheticoligonucleotide
  source 1..56: mol_type = other RNA
ctttcaagactaatagattgctccttacgaggagactggtgctgatggaggagacc

SEQ ID NO: 1013 - RNA, 56 nt, synthetic construct
  misc_feature 1..56: note = Description of Artificial Sequence: Syntheticoligonucleotide
  source 1..56: mol_type = other RNA
ctttcaagactaatagattgctccttacgaggagacaatctgtagcctctgggtct

SEQ ID NO: 1014 - RNA, 56 nt, synthetic construct
  misc_feature 1..56: note = Description of Artificial Sequence: Syntheticoligonucleotide
  source 1..56: mol_type = other RNA
ctttcaagactaatagattgctccttacgaggagacttcaatctgtagcctctggg

SEQ ID NO: 1015 - RNA, 56 nt, synthetic construct
  misc_feature 1..56: note = Description of Artificial Sequence: Syntheticoligonucleotide
  source 1..56: mol_type = other RNA
ctttcaagactaatagattgctccttacgaggagacgttcaatctgtagcctctgg

SEQ ID NO: 1016 - RNA, 56 nt, synthetic construct
  misc_feature 1..56: note = Description of Artificial Sequence: Syntheticoligonucleotide
  source 1..56: mol_type = other RNA
ctttcaagactaatagattgctccttacgaggagacaacaaactgcccaccgcctg

SEQ ID NO: 1017 - RNA, 56 nt, synthetic construct
  misc_feature 1..56: note = Description of Artificial Sequence: Syntheticoligonucleotide
  source 1..56: mol_type = other RNA
ctttcaagactaatagattgctccttacgaggagacatgacatagccccggcgggc

SEQ ID NO: 1018 - RNA, 56 nt, synthetic construct
  misc_feature 1..56: note = Description of Artificial Sequence: Syntheticoligonucleotide
  source 1..56: mol_type = other RNA
ctttcaagactaatagattgctccttacgaggagactacatatcttttatgacctc

SEQ ID NO: 1019 - RNA, 56 nt, synthetic construct
  misc_feature 1..56: note = Description of Artificial Sequence: Syntheticoligonucleotide
  source 1..56: mol_type = other RNA
ctttcaagactaatagattgctccttacgaggagactatgacctcttccctggctt

SEQ ID NO: 1020 - RNA, 56 nt, synthetic construct
  misc_feature 1..56: note = Description of Artificial Sequence: Syntheticoligonucleotide
  source 1..56: mol_type = other RNA
ctttcaagactaatagattgctccttacgaggagacatgacctcttccctggcttc

SEQ ID NO: 1021 - RNA, 56 nt, synthetic construct
  misc_feature 1..56: note = Description of Artificial Sequence: Syntheticoligonucleotide
  source 1..56: mol_type = other RNA
ctttcaagactaatagattgctccttacgaggagactgacctcttccctggcttct

SEQ ID NO: 1022 - RNA, 56 nt, synthetic construct
  misc_feature 1..56: note = Description of Artificial Sequence: Syntheticoligonucleotide
  source 1..56: mol_type = other RNA
ctttcaagactaatagattgctccttacgaggagacaccaagaagccagggaagag

SEQ ID NO: 1023 - RNA, 56 nt, synthetic construct
  misc_feature 1..56: note = Description of Artificial Sequence: Syntheticoligonucleotide
  source 1..56: mol_type = other RNA
ctttcaagactaatagattgctccttacgaggagaccctggcttcttggtgaagat

SEQ ID NO: 1024 - RNA, 56 nt, synthetic construct
  misc_feature 1..56: note = Description of Artificial Sequence: Syntheticoligonucleotide
  source 1..56: mol_type = other RNA
ctttcaagactaatagattgctccttacgaggagacttggtgaagatgagcagtga

SEQ ID NO: 1025 - RNA, 56 nt, synthetic construct
  misc_feature 1..56: note = Description of Artificial Sequence: Syntheticoligonucleotide
  source 1..56: mol_type = other RNA
ctttcaagactaatagattgctccttacgaggagacgtgaagatgagcagtgacct

SEQ ID NO: 1026 - RNA, 56 nt, synthetic construct
  misc_feature 1..56: note = Description of Artificial Sequence: Syntheticoligonucleotide
  source 1..56: mol_type = other RNA
ctttcaagactaatagattgctccttacgaggagacccccatgtggagtacattga

SEQ ID NO: 1027 - RNA, 56 nt, synthetic construct
  misc_feature 1..56: note = Description of Artificial Sequence: Syntheticoligonucleotide
  source 1..56: mol_type = other RNA
ctttcaagactaatagattgctccttacgaggagacctcaatgtactccacatggg

SEQ ID NO: 1028 - RNA, 56 nt, synthetic construct
  misc_feature 1..56: note = Description of Artificial Sequence: Syntheticoligonucleotide
  source 1..56: mol_type = other RNA
ctttcaagactaatagattgctccttacgaggagacaggaagactcctttgtcttc

SEQ ID NO: 1029 - RNA, 56 nt, synthetic construct
  misc_feature 1..56: note = Description of Artificial Sequence: Syntheticoligonucleotide
  source 1..56: mol_type = other RNA
ctttcaagactaatagattgctccttacgaggagacgtcttcgcccagagcatccc

SEQ ID NO: 1030 - RNA, 56 nt, synthetic construct
  misc_feature 1..56: note = Description of Artificial Sequence: Syntheticoligonucleotide
  source 1..56: mol_type = other RNA
ctttcaagactaatagattgctccttacgaggagactcttcgcccagagcatccca

SEQ ID NO: 1031 - RNA, 56 nt, synthetic construct
  misc_feature 1..56: note = Description of Artificial Sequence: Syntheticoligonucleotide
  source 1..56: mol_type = other RNA
ctttcaagactaatagattgctccttacgaggagacgcccagagcatcccatggaa

SEQ ID NO: 1032 - RNA, 56 nt, synthetic construct
  misc_feature 1..56: note = Description of Artificial Sequence: Syntheticoligonucleotide
  source 1..56: mol_type = other RNA
ctttcaagactaatagattgctccttacgaggagaccatgggatgctctgggcgaa

SEQ ID NO: 1033 - RNA, 56 nt, synthetic construct
  misc_feature 1..56: note = Description of Artificial Sequence: Syntheticoligonucleotide
  source 1..56: mol_type = other RNA
ctttcaagactaatagattgctccttacgaggagacgctccaggttccatgggatg

SEQ ID NO: 1034 - RNA, 56 nt, synthetic construct
  misc_feature 1..56: note = Description of Artificial Sequence: Syntheticoligonucleotide
  source 1..56: mol_type = other RNA
ctttcaagactaatagattgctccttacgaggagactcccagcatggcaccagaca

SEQ ID NO: 1035 - RNA, 56 nt, synthetic construct
  misc_feature 1..56: note = Description of Artificial Sequence: Syntheticoligonucleotide
  source 1..56: mol_type = other RNA
ctttcaagactaatagattgctccttacgaggagacctctgtctggtgccatgctg

SEQ ID NO: 1036 - RNA, 56 nt, synthetic construct
  misc_feature 1..56: note = Description of Artificial Sequence: Syntheticoligonucleotide
  source 1..56: mol_type = other RNA
ctttcaagactaatagattgctccttacgaggagacgataccagcatccagggtgc

SEQ ID NO: 1037 - RNA, 56 nt, synthetic construct
  misc_feature 1..56: note = Description of Artificial Sequence: Syntheticoligonucleotide
  source 1..56: mol_type = other RNA
ctttcaagactaatagattgctccttacgaggagacagggcagggtcaccatcacc

SEQ ID NO: 1038 - RNA, 56 nt, synthetic construct
  misc_feature 1..56: note = Description of Artificial Sequence: Syntheticoligonucleotide
  source 1..56: mol_type = other RNA
ctttcaagactaatagattgctccttacgaggagacaagtcggtgatggtgaccct

SEQ ID NO: 1039 - RNA, 56 nt, synthetic construct
  misc_feature 1..56: note = Description of Artificial Sequence: Syntheticoligonucleotide
  source 1..56: mol_type = other RNA
ctttcaagactaatagattgctccttacgaggagacaacagcgtgccggaggagga

SEQ ID NO: 1040 - RNA, 56 nt, synthetic construct
  misc_feature 1..56: note = Description of Artificial Sequence: Syntheticoligonucleotide
  source 1..56: mol_type = other RNA
ctttcaagactaatagattgctccttacgaggagacgccacaccagcatcccggcc

SEQ ID NO: 1041 - RNA, 56 nt, synthetic construct
  misc_feature 1..56: note = Description of Artificial Sequence: Syntheticoligonucleotide
  source 1..56: mol_type = other RNA
ctttcaagactaatagattgctccttacgaggagacagcacacgcaggctgtgcag

SEQ ID NO: 1042 - RNA, 56 nt, synthetic construct
  misc_feature 1..56: note = Description of Artificial Sequence: Syntheticoligonucleotide
  source 1..56: mol_type = other RNA
ctttcaagactaatagattgctccttacgaggagacacagttgagcacacgcaggc

SEQ ID NO: 1043 - RNA, 56 nt, synthetic construct
  misc_feature 1..56: note = Description of Artificial Sequence: Syntheticoligonucleotide
  source 1..56: mol_type = other RNA
ctttcaagactaatagattgctccttacgaggagacccttgacagttgagcacacg

SEQ ID NO: 1044 - RNA, 56 nt, synthetic construct
  misc_feature 1..56: note = Description of Artificial Sequence: Syntheticoligonucleotide
  source 1..56: mol_type = other RNA
ctttcaagactaatagattgctccttacgaggagacgctgactcttccgaataaac

SEQ ID NO: 1045 - RNA, 56 nt, synthetic construct
  misc_feature 1..56: note = Description of Artificial Sequence: Syntheticoligonucleotide
  source 1..56: mol_type = other RNA
ctttcaagactaatagattgctccttacgaggagacattcggaagagtcagctaat

SEQ ID NO: 1046 - RNA, 56 nt, synthetic construct
  misc_feature 1..56: note = Description of Artificial Sequence: Syntheticoligonucleotide
  source 1..56: mol_type = other RNA
ctttcaagactaatagattgctccttacgaggagacttcggaagagtcagctaatc

SEQ ID NO: 1047 - RNA, 56 nt, synthetic construct
  misc_feature 1..56: note = Description of Artificial Sequence: Syntheticoligonucleotide
  source 1..56: mol_type = other RNA
ctttcaagactaatagattgctccttacgaggagacggaagagtcagctaatccag

SEQ ID NO: 1048 - RNA, 56 nt, synthetic construct
  misc_feature 1..56: note = Description of Artificial Sequence: Syntheticoligonucleotide
  source 1..56: mol_type = other RNA
ctttcaagactaatagattgctccttacgaggagactgctgcccctggccggtggg

SEQ ID NO: 1049 - RNA, 56 nt, synthetic construct
  misc_feature 1..56: note = Description of Artificial Sequence: Syntheticoligonucleotide
  source 1..56: mol_type = other RNA
ctttcaagactaatagattgctccttacgaggagacaggatgcggctatacccacc

SEQ ID NO: 1050 - RNA, 56 nt, synthetic construct
  misc_feature 1..56: note = Description of Artificial Sequence: Syntheticoligonucleotide
  source 1..56: mol_type = other RNA
ctttcaagactaatagattgctccttacgaggagacccagctgctgcaaccagcac

SEQ ID NO: 1051 - RNA, 56 nt, synthetic construct
  misc_feature 1..56: note = Description of Artificial Sequence: Syntheticoligonucleotide
  source 1..56: mol_type = other RNA
ctttcaagactaatagattgctccttacgaggagaccagcagctgggaacttccgg

SEQ ID NO: 1052 - RNA, 56 nt, synthetic construct
  misc_feature 1..56: note = Description of Artificial Sequence: Syntheticoligonucleotide
  source 1..56: mol_type = other RNA
ctttcaagactaatagattgctccttacgaggagaccgggacgacgcctgcctcta

SEQ ID NO: 1053 - RNA, 56 nt, synthetic construct
  misc_feature 1..56: note = Description of Artificial Sequence: Syntheticoligonucleotide
  source 1..56: mol_type = other RNA
ctttcaagactaatagattgctccttacgaggagacgtggccccgactgtgatgac

SEQ ID NO: 1054 - RNA, 56 nt, synthetic construct
  misc_feature 1..56: note = Description of Artificial Sequence: Syntheticoligonucleotide
  source 1..56: mol_type = other RNA
ctttcaagactaatagattgctccttacgaggagacccttggggactttggggact

SEQ ID NO: 1055 - RNA, 56 nt, synthetic construct
  misc_feature 1..56: note = Description of Artificial Sequence: Syntheticoligonucleotide
  source 1..56: mol_type = other RNA
ctttcaagactaatagattgctccttacgaggagacgtccccaaagtccccaaggt

SEQ ID NO: 1056 - RNA, 56 nt, synthetic construct
  misc_feature 1..56: note = Description of Artificial Sequence: Syntheticoligonucleotide
  source 1..56: mol_type = other RNA
ctttcaagactaatagattgctccttacgaggagacgggactttggggactaattt

SEQ ID NO: 1057 - RNA, 56 nt, synthetic construct
  misc_feature 1..56: note = Description of Artificial Sequence: Syntheticoligonucleotide
  source 1..56: mol_type = other RNA
ctttcaagactaatagattgctccttacgaggagacggggactaattttggacgct

SEQ ID NO: 1058 - RNA, 56 nt, synthetic construct
  misc_feature 1..56: note = Description of Artificial Sequence: Syntheticoligonucleotide
  source 1..56: mol_type = other RNA
ctttcaagactaatagattgctccttacgaggagacgggactaattttggacgctg

SEQ ID NO: 1059 - RNA, 56 nt, synthetic construct
  misc_feature 1..56: note = Description of Artificial Sequence: Syntheticoligonucleotide
  source 1..56: mol_type = other RNA
ctttcaagactaatagattgctccttacgaggagactggacgctgtgtggatctct

SEQ ID NO: 1060 - RNA, 56 nt, synthetic construct
  misc_feature 1..56: note = Description of Artificial Sequence: Syntheticoligonucleotide
  source 1..56: mol_type = other RNA
ctttcaagactaatagattgctccttacgaggagacggacgctgtgtggatctctt

SEQ ID NO: 1061 - RNA, 56 nt, synthetic construct
  misc_feature 1..56: note = Description of Artificial Sequence: Syntheticoligonucleotide
  source 1..56: mol_type = other RNA
ctttcaagactaatagattgctccttacgaggagacgacgctgtgtggatctcttt

SEQ ID NO: 1062 - RNA, 56 nt, synthetic construct
  misc_feature 1..56: note = Description of Artificial Sequence: Syntheticoligonucleotide
  source 1..56: mol_type = other RNA
ctttcaagactaatagattgctccttacgaggagacccgggggcaaagagatccac

SEQ ID NO: 1063 - RNA, 56 nt, synthetic construct
  misc_feature 1..56: note = Description of Artificial Sequence: Syntheticoligonucleotide
  source 1..56: mol_type = other RNA
ctttcaagactaatagattgctccttacgaggagacgcccccgggaaggacatcat

SEQ ID NO: 1064 - RNA, 56 nt, synthetic construct
  misc_feature 1..56: note = Description of Artificial Sequence: Syntheticoligonucleotide
  source 1..56: mol_type = other RNA
ctttcaagactaatagattgctccttacgaggagaccccccgggaaggacatcatc

SEQ ID NO: 1065 - RNA, 56 nt, synthetic construct
  misc_feature 1..56: note = Description of Artificial Sequence: Syntheticoligonucleotide
  source 1..56: mol_type = other RNA
ctttcaagactaatagattgctccttacgaggagacatgtcacagagtgggacctc

SEQ ID NO: 1066 - RNA, 56 nt, synthetic construct
  misc_feature 1..56: note = Description of Artificial Sequence: Syntheticoligonucleotide
  source 1..56: mol_type = other RNA
ctttcaagactaatagattgctccttacgaggagactggctcggatgctgagccgg

SEQ ID NO: 1067 - RNA, 56 nt, synthetic construct
  misc_feature 1..56: note = Description of Artificial Sequence: Syntheticoligonucleotide
  source 1..56: mol_type = other RNA
ctttcaagactaatagattgctccttacgaggagacccctggccgagctgcggcag

SEQ ID NO: 1068 - RNA, 56 nt, synthetic construct
  misc_feature 1..56: note = Description of Artificial Sequence: Syntheticoligonucleotide
  source 1..56: mol_type = other RNA
ctttcaagactaatagattgctccttacgaggagacgtagagaagtggatcagcct

SEQ ID NO: 1069 - RNA, 56 nt, synthetic construct
  misc_feature 1..56: note = Description of Artificial Sequence: Syntheticoligonucleotide
  source 1..56: mol_type = other RNA
ctttcaagactaatagattgctccttacgaggagacggtagagaagtggatcagcc

SEQ ID NO: 1070 - RNA, 56 nt, synthetic construct
  misc_feature 1..56: note = Description of Artificial Sequence: Syntheticoligonucleotide
  source 1..56: mol_type = other RNA
ctttcaagactaatagattgctccttacgaggagactctaccaaagacgtcatcaa

SEQ ID NO: 1071 - RNA, 56 nt, synthetic construct
  misc_feature 1..56: note = Description of Artificial Sequence: Syntheticoligonucleotide
  source 1..56: mol_type = other RNA
ctttcaagactaatagattgctccttacgaggagacatgacgtctttggtagagaa

SEQ ID NO: 1072 - RNA, 56 nt, synthetic construct
  misc_feature 1..56: note = Description of Artificial Sequence: Syntheticoligonucleotide
  source 1..56: mol_type = other RNA
ctttcaagactaatagattgctccttacgaggagaccctgaggaccagcaggtgct

SEQ ID NO: 1073 - RNA, 56 nt, synthetic construct
  misc_feature 1..56: note = Description of Artificial Sequence: Syntheticoligonucleotide
  source 1..56: mol_type = other RNA
ctttcaagactaatagattgctccttacgaggagacggggtcagcacctgctggtc

SEQ ID NO: 1074 - RNA, 56 nt, synthetic construct
  misc_feature 1..56: note = Description of Artificial Sequence: Syntheticoligonucleotide
  source 1..56: mol_type = other RNA
ctttcaagactaatagattgctccttacgaggagacgagtgggccccgagtgtgcc

SEQ ID NO: 1075 - RNA, 56 nt, synthetic construct
  misc_feature 1..56: note = Description of Artificial Sequence: Syntheticoligonucleotide
  source 1..56: mol_type = other RNA
ctttcaagactaatagattgctccttacgaggagactggggcacagcgggctgtag

SEQ ID NO: 1076 - RNA, 56 nt, synthetic construct
  misc_feature 1..56: note = Description of Artificial Sequence: Syntheticoligonucleotide
  source 1..56: mol_type = other RNA
ctttcaagactaatagattgctccttacgaggagactccaggagcgggaggcgtcg

SEQ ID NO: 1077 - RNA, 56 nt, synthetic construct
  misc_feature 1..56: note = Description of Artificial Sequence: Syntheticoligonucleotide
  source 1..56: mol_type = other RNA
ctttcaagactaatagattgctccttacgaggagaccagacctgctggcctcctat

SEQ ID NO: 1078 - RNA, 56 nt, synthetic construct
  misc_feature 1..56: note = Description of Artificial Sequence: Syntheticoligonucleotide
  source 1..56: mol_type = other RNA
ctttcaagactaatagattgctccttacgaggagacagggccttgcagacctgctg

SEQ ID NO: 1079 - RNA, 56 nt, synthetic construct
  misc_feature 1..56: note = Description of Artificial Sequence: Syntheticoligonucleotide
  source 1..56: mol_type = other RNA
ctttcaagactaatagattgctccttacgaggagacgggggtgagggtgtctatgc

SEQ ID NO: 1080 - RNA, 56 nt, synthetic construct
  misc_feature 1..56: note = Description of Artificial Sequence: Syntheticoligonucleotide
  source 1..56: mol_type = other RNA
ctttcaagactaatagattgctccttacgaggagacggggtgagggtgtctatgcc

SEQ ID NO: 1081 - RNA, 56 nt, synthetic construct
  misc_feature 1..56: note = Description of Artificial Sequence: Syntheticoligonucleotide
  source 1..56: mol_type = other RNA
ctttcaagactaatagattgctccttacgaggagacgcacggggaaccaggcagca

SEQ ID NO: 1082 - RNA, 56 nt, synthetic construct
  misc_feature 1..56: note = Description of Artificial Sequence: Syntheticoligonucleotide
  source 1..56: mol_type = other RNA
ctttcaagactaatagattgctccttacgaggagaccccgtgccaactgcagcatc

SEQ ID NO: 1083 - RNA, 56 nt, synthetic construct
  misc_feature 1..56: note = Description of Artificial Sequence: Syntheticoligonucleotide
  source 1..56: mol_type = other RNA
ctttcaagactaatagattgctccttacgaggagactggatgctgcagttggcacg

SEQ ID NO: 1084 - RNA, 56 nt, synthetic construct
  misc_feature 1..56: note = Description of Artificial Sequence: Syntheticoligonucleotide
  source 1..56: mol_type = other RNA
ctttcaagactaatagattgctccttacgaggagactggtggcagtggacatgggt

SEQ ID NO: 1085 - RNA, 56 nt, synthetic construct
  misc_feature 1..56: note = Description of Artificial Sequence: Syntheticoligonucleotide
  source 1..56: mol_type = other RNA
ctttcaagactaatagattgctccttacgaggagaccacttcccaatggaagctgc

SEQ ID NO: 1086 - RNA, 56 nt, synthetic construct
  misc_feature 1..56: note = Description of Artificial Sequence: Syntheticoligonucleotide
  source 1..56: mol_type = other RNA
ctttcaagactaatagattgctccttacgaggagaccattgggaagtggaagacct

SEQ ID NO: 1087 - RNA, 56 nt, synthetic construct
  misc_feature 1..56: note = Description of Artificial Sequence: Syntheticoligonucleotide
  source 1..56: mol_type = other RNA
ctttcaagactaatagattgctccttacgaggagacggaagtggaagaccttagtg

SEQ ID NO: 1088 - RNA, 56 nt, synthetic construct
  misc_feature 1..56: note = Description of Artificial Sequence: Syntheticoligonucleotide
  source 1..56: mol_type = other RNA
ctttcaagactaatagattgctccttacgaggagacgtgtccggaggcagcctgcg

SEQ ID NO: 1089 - RNA, 56 nt, synthetic construct
  misc_feature 1..56: note = Description of Artificial Sequence: Syntheticoligonucleotide
  source 1..56: mol_type = other RNA
ctttcaagactaatagattgctccttacgaggagacgccaccaggcggccagtgtc

SEQ ID NO: 1090 - RNA, 56 nt, synthetic construct
  misc_feature 1..56: note = Description of Artificial Sequence: Syntheticoligonucleotide
  source 1..56: mol_type = other RNA
ctttcaagactaatagattgctccttacgaggagacctgctgccatgccccagggc

SEQ ID NO: 1091 - RNA, 56 nt, synthetic construct
  misc_feature 1..56: note = Description of Artificial Sequence: Syntheticoligonucleotide
  source 1..56: mol_type = other RNA
ctttcaagactaatagattgctccttacgaggagaccagccctggggcatggcagc

SEQ ID NO: 1092 - RNA, 56 nt, synthetic construct
  misc_feature 1..56: note = Description of Artificial Sequence: Syntheticoligonucleotide
  source 1..56: mol_type = other RNA
ctttcaagactaatagattgctccttacgaggagaccattccagccctggggcatg

SEQ ID NO: 1093 - RNA, 56 nt, synthetic construct
  misc_feature 1..56: note = Description of Artificial Sequence: Syntheticoligonucleotide
  source 1..56: mol_type = other RNA
ctttcaagactaatagattgctccttacgaggagacgcattccagccctggggcat

SEQ ID NO: 1094 - RNA, 56 nt, synthetic construct
  misc_feature 1..56: note = Description of Artificial Sequence: Syntheticoligonucleotide
  source 1..56: mol_type = other RNA
ctttcaagactaatagattgctccttacgaggagactgcattccagccctggggca

SEQ ID NO: 1095 - RNA, 56 nt, synthetic construct
  misc_feature 1..56: note = Description of Artificial Sequence: Syntheticoligonucleotide
  source 1..56: mol_type = other RNA
ctttcaagactaatagattgctccttacgaggagacattttgcattccagccctgg

SEQ ID NO: 1096 - RNA, 56 nt, synthetic construct
  misc_feature 1..56: note = Description of Artificial Sequence: Syntheticoligonucleotide
  source 1..56: mol_type = other RNA
ctttcaagactaatagattgctccttacgaggagaccatccagtcagggtccatcc

SEQ ID NO: 1097 - RNA, 56 nt, synthetic construct
  misc_feature 1..56: note = Description of Artificial Sequence: Syntheticoligonucleotide
  source 1..56: mol_type = other RNA
ctttcaagactaatagattgctccttacgaggagactccacgctgtaggctcccag

SEQ ID NO: 1098 - RNA, 56 nt, synthetic construct
  misc_feature 1..56: note = Description of Artificial Sequence: Syntheticoligonucleotide
  source 1..56: mol_type = other RNA
ctttcaagactaatagattgctccttacgaggagacccacacacaggttgtccacg

SEQ ID NO: 1099 - RNA, 56 nt, synthetic construct
  misc_feature 1..56: note = Description of Artificial Sequence: Syntheticoligonucleotide
  source 1..56: mol_type = other RNA
ctttcaagactaatagattgctccttacgaggagactccactggtcctgtctgctc

SEQ ID NO: 1100 - RNA, 56 nt, synthetic construct
  misc_feature 1..56: note = Description of Artificial Sequence: Syntheticoligonucleotide
  source 1..56: mol_type = other RNA
ctttcaagactaatagattgctccttacgaggagacctgaaggccggctccggcag

SEQ ID NO: 1101 - RNA, 57 nt, synthetic construct
  misc_feature 1..57: note = Description of Artificial Sequence: Syntheticoligonucleotide
  source 1..57: mol_type = other RNA
gctggggaccgatcctgattgctcgctgcggcgagacccgctgttgccgccgctgct

SEQ ID NO: 1102 - RNA, 57 nt, synthetic construct
  misc_feature 1..57: note = Description of Artificial Sequence: Syntheticoligonucleotide
  source 1..57: mol_type = other RNA
gctggggaccgatcctgattgctcgctgcggcgagacccgccgctgctgctgctgtt

SEQ ID NO: 1103 - RNA, 57 nt, synthetic construct
  misc_feature 1..57: note = Description of Artificial Sequence: Syntheticoligonucleotide
  source 1..57: mol_type = other RNA
gctggggaccgatcctgattgctcgctgcggcgagacctgctactgtgccccaccgg

SEQ ID NO: 1104 - RNA, 57 nt, synthetic construct
  misc_feature 1..57: note = Description of Artificial Sequence: Syntheticoligonucleotide
  source 1..57: mol_type = other RNA
gctggggaccgatcctgattgctcgctgcggcgagacataatctccatcctcgtcct

SEQ ID NO: 1105 - RNA, 57 nt, synthetic construct
  misc_feature 1..57: note = Description of Artificial Sequence: Syntheticoligonucleotide
  source 1..57: mol_type = other RNA
gctggggaccgatcctgattgctcgctgcggcgagactgaagagctgatgctcgccc

SEQ ID NO: 1106 - RNA, 57 nt, synthetic construct
  misc_feature 1..57: note = Description of Artificial Sequence: Syntheticoligonucleotide
  source 1..57: mol_type = other RNA
gctggggaccgatcctgattgctcgctgcggcgagacgagcaacggcggaaggtggc

SEQ ID NO: 1107 - RNA, 57 nt, synthetic construct
  misc_feature 1..57: note = Description of Artificial Sequence: Syntheticoligonucleotide
  source 1..57: mol_type = other RNA
gctggggaccgatcctgattgctcgctgcggcgagacctggcagcctccaggcctcc

SEQ ID NO: 1108 - RNA, 57 nt, synthetic construct
  misc_feature 1..57: note = Description of Artificial Sequence: Syntheticoligonucleotide
  source 1..57: mol_type = other RNA
gctggggaccgatcctgattgctcgctgcggcgagactggtgctgatggaggagacc

SEQ ID NO: 1109 - RNA, 57 nt, synthetic construct
  misc_feature 1..57: note = Description of Artificial Sequence: Syntheticoligonucleotide
  source 1..57: mol_type = other RNA
gctggggaccgatcctgattgctcgctgcggcgagacaatctgtagcctctgggtct

SEQ ID NO: 1110 - RNA, 57 nt, synthetic construct
  misc_feature 1..57: note = Description of Artificial Sequence: Syntheticoligonucleotide
  source 1..57: mol_type = other RNA
gctggggaccgatcctgattgctcgctgcggcgagacttcaatctgtagcctctggg

SEQ ID NO: 1111 - RNA, 57 nt, synthetic construct
  misc_feature 1..57: note = Description of Artificial Sequence: Syntheticoligonucleotide
  source 1..57: mol_type = other RNA
gctggggaccgatcctgattgctcgctgcggcgagacgttcaatctgtagcctctgg

SEQ ID NO: 1112 - RNA, 57 nt, synthetic construct
  misc_feature 1..57: note = Description of Artificial Sequence: Syntheticoligonucleotide
  source 1..57: mol_type = other RNA
gctggggaccgatcctgattgctcgctgcggcgagacaacaaactgcccaccgcctg

SEQ ID NO: 1113 - RNA, 57 nt, synthetic construct
  misc_feature 1..57: note = Description of Artificial Sequence: Syntheticoligonucleotide
  source 1..57: mol_type = other RNA
gctggggaccgatcctgattgctcgctgcggcgagacatgacatagccccggcgggc

SEQ ID NO: 1114 - RNA, 57 nt, synthetic construct
  misc_feature 1..57: note = Description of Artificial Sequence: Syntheticoligonucleotide
  source 1..57: mol_type = other RNA
gctggggaccgatcctgattgctcgctgcggcgagactacatatcttttatgacctc

SEQ ID NO: 1115 - RNA, 57 nt, synthetic construct
  misc_feature 1..57: note = Description of Artificial Sequence: Syntheticoligonucleotide
  source 1..57: mol_type = other RNA
gctggggaccgatcctgattgctcgctgcggcgagactatgacctcttccctggctt

SEQ ID NO: 1116 - RNA, 57 nt, synthetic construct
  misc_feature 1..57: note = Description of Artificial Sequence: Syntheticoligonucleotide
  source 1..57: mol_type = other RNA
gctggggaccgatcctgattgctcgctgcggcgagacatgacctcttccctggcttc

SEQ ID NO: 1117 - RNA, 57 nt, synthetic construct
  misc_feature 1..57: note = Description of Artificial Sequence: Syntheticoligonucleotide
  source 1..57: mol_type = other RNA
gctggggaccgatcctgattgctcgctgcggcgagactgacctcttccctggcttct

SEQ ID NO: 1118 - RNA, 57 nt, synthetic construct
  misc_feature 1..57: note = Description of Artificial Sequence: Syntheticoligonucleotide
  source 1..57: mol_type = other RNA
gctggggaccgatcctgattgctcgctgcggcgagacaccaagaagccagggaagag

SEQ ID NO: 1119 - RNA, 57 nt, synthetic construct
  misc_feature 1..57: note = Description of Artificial Sequence: Syntheticoligonucleotide
  source 1..57: mol_type = other RNA
gctggggaccgatcctgattgctcgctgcggcgagaccctggcttcttggtgaagat

SEQ ID NO: 1120 - RNA, 57 nt, synthetic construct
  misc_feature 1..57: note = Description of Artificial Sequence: Syntheticoligonucleotide
  source 1..57: mol_type = other RNA
gctggggaccgatcctgattgctcgctgcggcgagacttggtgaagatgagcagtga

SEQ ID NO: 1121 - RNA, 57 nt, synthetic construct
  misc_feature 1..57: note = Description of Artificial Sequence: Syntheticoligonucleotide
  source 1..57: mol_type = other RNA
gctggggaccgatcctgattgctcgctgcggcgagacgtgaagatgagcagtgacct

SEQ ID NO: 1122 - RNA, 57 nt, synthetic construct
  misc_feature 1..57: note = Description of Artificial Sequence: Syntheticoligonucleotide
  source 1..57: mol_type = other RNA
gctggggaccgatcctgattgctcgctgcggcgagacccccatgtggagtacattga

SEQ ID NO: 1123 - RNA, 57 nt, synthetic construct
  misc_feature 1..57: note = Description of Artificial Sequence: Syntheticoligonucleotide
  source 1..57: mol_type = other RNA
gctggggaccgatcctgattgctcgctgcggcgagacctcaatgtactccacatggg

SEQ ID NO: 1124 - RNA, 57 nt, synthetic construct
  misc_feature 1..57: note = Description of Artificial Sequence: Syntheticoligonucleotide
  source 1..57: mol_type = other RNA
gctggggaccgatcctgattgctcgctgcggcgagacaggaagactcctttgtcttc

SEQ ID NO: 1125 - RNA, 57 nt, synthetic construct
  misc_feature 1..57: note = Description of Artificial Sequence: Syntheticoligonucleotide
  source 1..57: mol_type = other RNA
gctggggaccgatcctgattgctcgctgcggcgagacgtcttcgcccagagcatccc

SEQ ID NO: 1126 - RNA, 57 nt, synthetic construct
  misc_feature 1..57: note = Description of Artificial Sequence: Syntheticoligonucleotide
  source 1..57: mol_type = other RNA
gctggggaccgatcctgattgctcgctgcggcgagactcttcgcccagagcatccca

SEQ ID NO: 1127 - RNA, 57 nt, synthetic construct
  misc_feature 1..57: note = Description of Artificial Sequence: Syntheticoligonucleotide
  source 1..57: mol_type = other RNA
gctggggaccgatcctgattgctcgctgcggcgagacgcccagagcatcccatggaa

SEQ ID NO: 1128 - RNA, 57 nt, synthetic construct
  misc_feature 1..57: note = Description of Artificial Sequence: Syntheticoligonucleotide
  source 1..57: mol_type = other RNA
gctggggaccgatcctgattgctcgctgcggcgagaccatgggatgctctgggcgaa

SEQ ID NO: 1129 - RNA, 57 nt, synthetic construct
  misc_feature 1..57: note = Description of Artificial Sequence: Syntheticoligonucleotide
  source 1..57: mol_type = other RNA
gctggggaccgatcctgattgctcgctgcggcgagacgctccaggttccatgggatg

SEQ ID NO: 1130 - RNA, 57 nt, synthetic construct
  misc_feature 1..57: note = Description of Artificial Sequence: Syntheticoligonucleotide
  source 1..57: mol_type = other RNA
gctggggaccgatcctgattgctcgctgcggcgagactcccagcatggcaccagaca

SEQ ID NO: 1131 - RNA, 57 nt, synthetic construct
  misc_feature 1..57: note = Description of Artificial Sequence: Syntheticoligonucleotide
  source 1..57: mol_type = other RNA
gctggggaccgatcctgattgctcgctgcggcgagacctctgtctggtgccatgctg

SEQ ID NO: 1132 - RNA, 57 nt, synthetic construct
  misc_feature 1..57: note = Description of Artificial Sequence: Syntheticoligonucleotide
  source 1..57: mol_type = other RNA
gctggggaccgatcctgattgctcgctgcggcgagacgataccagcatccagggtgc

SEQ ID NO: 1133 - RNA, 57 nt, synthetic construct
  misc_feature 1..57: note = Description of Artificial Sequence: Syntheticoligonucleotide
  source 1..57: mol_type = other RNA
gctggggaccgatcctgattgctcgctgcggcgagacagggcagggtcaccatcacc

SEQ ID NO: 1134 - RNA, 57 nt, synthetic construct
  misc_feature 1..57: note = Description of Artificial Sequence: Syntheticoligonucleotide
  source 1..57: mol_type = other RNA
gctggggaccgatcctgattgctcgctgcggcgagacaagtcggtgatggtgaccct

SEQ ID NO: 1135 - RNA, 57 nt, synthetic construct
  misc_feature 1..57: note = Description of Artificial Sequence: Syntheticoligonucleotide
  source 1..57: mol_type = other RNA
gctggggaccgatcctgattgctcgctgcggcgagacaacagcgtgccggaggagga

SEQ ID NO: 1136 - RNA, 57 nt, synthetic construct
  misc_feature 1..57: note = Description of Artificial Sequence: Syntheticoligonucleotide
  source 1..57: mol_type = other RNA
gctggggaccgatcctgattgctcgctgcggcgagacgccacaccagcatcccggcc

SEQ ID NO: 1137 - RNA, 57 nt, synthetic construct
  misc_feature 1..57: note = Description of Artificial Sequence: Syntheticoligonucleotide
  source 1..57: mol_type = other RNA
gctggggaccgatcctgattgctcgctgcggcgagacagcacacgcaggctgtgcag

SEQ ID NO: 1138 - RNA, 57 nt, synthetic construct
  misc_feature 1..57: note = Description of Artificial Sequence: Syntheticoligonucleotide
  source 1..57: mol_type = other RNA
gctggggaccgatcctgattgctcgctgcggcgagacacagttgagcacacgcaggc

SEQ ID NO: 1139 - RNA, 57 nt, synthetic construct
  misc_feature 1..57: note = Description of Artificial Sequence: Syntheticoligonucleotide
  source 1..57: mol_type = other RNA
gctggggaccgatcctgattgctcgctgcggcgagacccttgacagttgagcacacg

SEQ ID NO: 1140 - RNA, 57 nt, synthetic construct
  misc_feature 1..57: note = Description of Artificial Sequence: Syntheticoligonucleotide
  source 1..57: mol_type = other RNA
gctggggaccgatcctgattgctcgctgcggcgagacgctgactcttccgaataaac

SEQ ID NO: 1141 - RNA, 57 nt, synthetic construct
  misc_feature 1..57: note = Description of Artificial Sequence: Syntheticoligonucleotide
  source 1..57: mol_type = other RNA
gctggggaccgatcctgattgctcgctgcggcgagacattcggaagagtcagctaat

SEQ ID NO: 1142 - RNA, 57 nt, synthetic construct
  misc_feature 1..57: note = Description of Artificial Sequence: Syntheticoligonucleotide
  source 1..57: mol_type = other RNA
gctggggaccgatcctgattgctcgctgcggcgagacttcggaagagtcagctaatc

SEQ ID NO: 1143 - RNA, 57 nt, synthetic construct
  misc_feature 1..57: note = Description of Artificial Sequence: Syntheticoligonucleotide
  source 1..57: mol_type = other RNA
gctggggaccgatcctgattgctcgctgcggcgagacggaagagtcagctaatccag

SEQ ID NO: 1144 - RNA, 57 nt, synthetic construct
  misc_feature 1..57: note = Description of Artificial Sequence: Syntheticoligonucleotide
  source 1..57: mol_type = other RNA
gctggggaccgatcctgattgctcgctgcggcgagactgctgcccctggccggtggg

SEQ ID NO: 1145 - RNA, 57 nt, synthetic construct
  misc_feature 1..57: note = Description of Artificial Sequence: Syntheticoligonucleotide
  source 1..57: mol_type = other RNA
gctggggaccgatcctgattgctcgctgcggcgagacaggatgcggctatacccacc

SEQ ID NO: 1146 - RNA, 57 nt, synthetic construct
  misc_feature 1..57: note = Description of Artificial Sequence: Syntheticoligonucleotide
  source 1..57: mol_type = other RNA
gctggggaccgatcctgattgctcgctgcggcgagacccagctgctgcaaccagcac

SEQ ID NO: 1147 - RNA, 57 nt, synthetic construct
  misc_feature 1..57: note = Description of Artificial Sequence: Syntheticoligonucleotide
  source 1..57: mol_type = other RNA
gctggggaccgatcctgattgctcgctgcggcgagaccagcagctgggaacttccgg

SEQ ID NO: 1148 - RNA, 57 nt, synthetic construct
  misc_feature 1..57: note = Description of Artificial Sequence: Syntheticoligonucleotide
  source 1..57: mol_type = other RNA
gctggggaccgatcctgattgctcgctgcggcgagaccgggacgacgcctgcctcta

SEQ ID NO: 1149 - RNA, 57 nt, synthetic construct
  misc_feature 1..57: note = Description of Artificial Sequence: Syntheticoligonucleotide
  source 1..57: mol_type = other RNA
gctggggaccgatcctgattgctcgctgcggcgagacgtggccccgactgtgatgac

SEQ ID NO: 1150 - RNA, 57 nt, synthetic construct
  misc_feature 1..57: note = Description of Artificial Sequence: Syntheticoligonucleotide
  source 1..57: mol_type = other RNA
gctggggaccgatcctgattgctcgctgcggcgagacccttggggactttggggact

SEQ ID NO: 1151 - RNA, 57 nt, synthetic construct
  misc_feature 1..57: note = Description of Artificial Sequence: Syntheticoligonucleotide
  source 1..57: mol_type = other RNA
gctggggaccgatcctgattgctcgctgcggcgagacgtccccaaagtccccaaggt

SEQ ID NO: 1152 - RNA, 57 nt, synthetic construct
  misc_feature 1..57: note = Description of Artificial Sequence: Syntheticoligonucleotide
  source 1..57: mol_type = other RNA
gctggggaccgatcctgattgctcgctgcggcgagacgggactttggggactaattt

SEQ ID NO: 1153 - RNA, 57 nt, synthetic construct
  misc_feature 1..57: note = Description of Artificial Sequence: Syntheticoligonucleotide
  source 1..57: mol_type = other RNA
gctggggaccgatcctgattgctcgctgcggcgagacggggactaattttggacgct

SEQ ID NO: 1154 - RNA, 57 nt, synthetic construct
  misc_feature 1..57: note = Description of Artificial Sequence: Syntheticoligonucleotide
  source 1..57: mol_type = other RNA
gctggggaccgatcctgattgctcgctgcggcgagacgggactaattttggacgctg

SEQ ID NO: 1155 - RNA, 57 nt, synthetic construct
  misc_feature 1..57: note = Description of Artificial Sequence: Syntheticoligonucleotide
  source 1..57: mol_type = other RNA
gctggggaccgatcctgattgctcgctgcggcgagactggacgctgtgtggatctct

SEQ ID NO: 1156 - RNA, 57 nt, synthetic construct
  misc_feature 1..57: note = Description of Artificial Sequence: Syntheticoligonucleotide
  source 1..57: mol_type = other RNA
gctggggaccgatcctgattgctcgctgcggcgagacggacgctgtgtggatctctt

SEQ ID NO: 1157 - RNA, 57 nt, synthetic construct
  misc_feature 1..57: note = Description of Artificial Sequence: Syntheticoligonucleotide
  source 1..57: mol_type = other RNA
gctggggaccgatcctgattgctcgctgcggcgagacgacgctgtgtggatctcttt

SEQ ID NO: 1158 - RNA, 57 nt, synthetic construct
  misc_feature 1..57: note = Description of Artificial Sequence: Syntheticoligonucleotide
  source 1..57: mol_type = other RNA
gctggggaccgatcctgattgctcgctgcggcgagacccgggggcaaagagatccac

SEQ ID NO: 1159 - RNA, 57 nt, synthetic construct
  misc_feature 1..57: note = Description of Artificial Sequence: Syntheticoligonucleotide
  source 1..57: mol_type = other RNA
gctggggaccgatcctgattgctcgctgcggcgagacgcccccgggaaggacatcat

SEQ ID NO: 1160 - RNA, 57 nt, synthetic construct
  misc_feature 1..57: note = Description of Artificial Sequence: Syntheticoligonucleotide
  source 1..57: mol_type = other RNA
gctggggaccgatcctgattgctcgctgcggcgagaccccccgggaaggacatcatc

SEQ ID NO: 1161 - RNA, 57 nt, synthetic construct
  misc_feature 1..57: note = Description of Artificial Sequence: Syntheticoligonucleotide
  source 1..57: mol_type = other RNA
gctggggaccgatcctgattgctcgctgcggcgagacatgtcacagagtgggacctc

SEQ ID NO: 1162 - RNA, 57 nt, synthetic construct
  misc_feature 1..57: note = Description of Artificial Sequence: Syntheticoligonucleotide
  source 1..57: mol_type = other RNA
gctggggaccgatcctgattgctcgctgcggcgagactggctcggatgctgagccgg

SEQ ID NO: 1163 - RNA, 57 nt, synthetic construct
  misc_feature 1..57: note = Description of Artificial Sequence: Syntheticoligonucleotide
  source 1..57: mol_type = other RNA
gctggggaccgatcctgattgctcgctgcggcgagacccctggccgagctgcggcag

SEQ ID NO: 1164 - RNA, 57 nt, synthetic construct
  misc_feature 1..57: note = Description of Artificial Sequence: Syntheticoligonucleotide
  source 1..57: mol_type = other RNA
gctggggaccgatcctgattgctcgctgcggcgagacgtagagaagtggatcagcct

SEQ ID NO: 1165 - RNA, 57 nt, synthetic construct
  misc_feature 1..57: note = Description of Artificial Sequence: Syntheticoligonucleotide
  source 1..57: mol_type = other RNA
gctggggaccgatcctgattgctcgctgcggcgagacggtagagaagtggatcagcc

SEQ ID NO: 1166 - RNA, 57 nt, synthetic construct
  misc_feature 1..57: note = Description of Artificial Sequence: Syntheticoligonucleotide
  source 1..57: mol_type = other RNA
gctggggaccgatcctgattgctcgctgcggcgagactctaccaaagacgtcatcaa

SEQ ID NO: 1167 - RNA, 57 nt, synthetic construct
  misc_feature 1..57: note = Description of Artificial Sequence: Syntheticoligonucleotide
  source 1..57: mol_type = other RNA
gctggggaccgatcctgattgctcgctgcggcgagacatgacgtctttggtagagaa

SEQ ID NO: 1168 - RNA, 57 nt, synthetic construct
  misc_feature 1..57: note = Description of Artificial Sequence: Syntheticoligonucleotide
  source 1..57: mol_type = other RNA
gctggggaccgatcctgattgctcgctgcggcgagaccctgaggaccagcaggtgct

SEQ ID NO: 1169 - RNA, 57 nt, synthetic construct
  misc_feature 1..57: note = Description of Artificial Sequence: Syntheticoligonucleotide
  source 1..57: mol_type = other RNA
gctggggaccgatcctgattgctcgctgcggcgagacggggtcagcacctgctggtc

SEQ ID NO: 1170 - RNA, 57 nt, synthetic construct
  misc_feature 1..57: note = Description of Artificial Sequence: Syntheticoligonucleotide
  source 1..57: mol_type = other RNA
gctggggaccgatcctgattgctcgctgcggcgagacgagtgggccccgagtgtgcc

SEQ ID NO: 1171 - RNA, 57 nt, synthetic construct
  misc_feature 1..57: note = Description of Artificial Sequence: Syntheticoligonucleotide
  source 1..57: mol_type = other RNA
gctggggaccgatcctgattgctcgctgcggcgagactggggcacagcgggctgtag

SEQ ID NO: 1172 - RNA, 57 nt, synthetic construct
  misc_feature 1..57: note = Description of Artificial Sequence: Syntheticoligonucleotide
  source 1..57: mol_type = other RNA
gctggggaccgatcctgattgctcgctgcggcgagactccaggagcgggaggcgtcg

SEQ ID NO: 1173 - RNA, 57 nt, synthetic construct
  misc_feature 1..57: note = Description of Artificial Sequence: Syntheticoligonucleotide
  source 1..57: mol_type = other RNA
gctggggaccgatcctgattgctcgctgcggcgagaccagacctgctggcctcctat

SEQ ID NO: 1174 - RNA, 57 nt, synthetic construct
  misc_feature 1..57: note = Description of Artificial Sequence: Syntheticoligonucleotide
  source 1..57: mol_type = other RNA
gctggggaccgatcctgattgctcgctgcggcgagacagggccttgcagacctgctg

SEQ ID NO: 1175 - RNA, 57 nt, synthetic construct
  misc_feature 1..57: note = Description of Artificial Sequence: Syntheticoligonucleotide
  source 1..57: mol_type = other RNA
gctggggaccgatcctgattgctcgctgcggcgagacgggggtgagggtgtctatgc

SEQ ID NO: 1176 - RNA, 57 nt, synthetic construct
  misc_feature 1..57: note = Description of Artificial Sequence: Syntheticoligonucleotide
  source 1..57: mol_type = other RNA
gctggggaccgatcctgattgctcgctgcggcgagacggggtgagggtgtctatgcc

SEQ ID NO: 1177 - RNA, 57 nt, synthetic construct
  misc_feature 1..57: note = Description of Artificial Sequence: Syntheticoligonucleotide
  source 1..57: mol_type = other RNA
gctggggaccgatcctgattgctcgctgcggcgagacgcacggggaaccaggcagca

SEQ ID NO: 1178 - RNA, 57 nt, synthetic construct
  misc_feature 1..57: note = Description of Artificial Sequence: Syntheticoligonucleotide
  source 1..57: mol_type = other RNA
gctggggaccgatcctgattgctcgctgcggcgagaccccgtgccaactgcagcatc

SEQ ID NO: 1179 - RNA, 57 nt, synthetic construct
  misc_feature 1..57: note = Description of Artificial Sequence: Syntheticoligonucleotide
  source 1..57: mol_type = other RNA
gctggggaccgatcctgattgctcgctgcggcgagactggatgctgcagttggcacg

SEQ ID NO: 1180 - RNA, 57 nt, synthetic construct
  misc_feature 1..57: note = Description of Artificial Sequence: Syntheticoligonucleotide
  source 1..57: mol_type = other RNA
gctggggaccgatcctgattgctcgctgcggcgagactggtggcagtggacatgggt

SEQ ID NO: 1181 - RNA, 57 nt, synthetic construct
  misc_feature 1..57: note = Description of Artificial Sequence: Syntheticoligonucleotide
  source 1..57: mol_type = other RNA
gctggggaccgatcctgattgctcgctgcggcgagaccacttcccaatggaagctgc

SEQ ID NO: 1182 - RNA, 57 nt, synthetic construct
  misc_feature 1..57: note = Description of Artificial Sequence: Syntheticoligonucleotide
  source 1..57: mol_type = other RNA
gctggggaccgatcctgattgctcgctgcggcgagaccattgggaagtggaagacct

SEQ ID NO: 1183 - RNA, 57 nt, synthetic construct
  misc_feature 1..57: note = Description of Artificial Sequence: Syntheticoligonucleotide
  source 1..57: mol_type = other RNA
gctggggaccgatcctgattgctcgctgcggcgagacggaagtggaagaccttagtg

SEQ ID NO: 1184 - RNA, 57 nt, synthetic construct
  misc_feature 1..57: note = Description of Artificial Sequence: Syntheticoligonucleotide
  source 1..57: mol_type = other RNA
gctggggaccgatcctgattgctcgctgcggcgagacgtgtccggaggcagcctgcg

SEQ ID NO: 1185 - RNA, 57 nt, synthetic construct
  misc_feature 1..57: note = Description of Artificial Sequence: Syntheticoligonucleotide
  source 1..57: mol_type = other RNA
gctggggaccgatcctgattgctcgctgcggcgagacgccaccaggcggccagtgtc

SEQ ID NO: 1186 - RNA, 57 nt, synthetic construct
  misc_feature 1..57: note = Description of Artificial Sequence: Syntheticoligonucleotide
  source 1..57: mol_type = other RNA
gctggggaccgatcctgattgctcgctgcggcgagacctgctgccatgccccagggc

SEQ ID NO: 1187 - RNA, 57 nt, synthetic construct
  misc_feature 1..57: note = Description of Artificial Sequence: Syntheticoligonucleotide
  source 1..57: mol_type = other RNA
gctggggaccgatcctgattgctcgctgcggcgagaccagccctggggcatggcagc

SEQ ID NO: 1188 - RNA, 57 nt, synthetic construct
  misc_feature 1..57: note = Description of Artificial Sequence: Syntheticoligonucleotide
  source 1..57: mol_type = other RNA
gctggggaccgatcctgattgctcgctgcggcgagaccattccagccctggggcatg

SEQ ID NO: 1189 - RNA, 57 nt, synthetic construct
  misc_feature 1..57: note = Description of Artificial Sequence: Syntheticoligonucleotide
  source 1..57: mol_type = other RNA
gctggggaccgatcctgattgctcgctgcggcgagacgcattccagccctggggcat

SEQ ID NO: 1190 - RNA, 57 nt, synthetic construct
  misc_feature 1..57: note = Description of Artificial Sequence: Syntheticoligonucleotide
  source 1..57: mol_type = other RNA
gctggggaccgatcctgattgctcgctgcggcgagactgcattccagccctggggca

SEQ ID NO: 1191 - RNA, 57 nt, synthetic construct
  misc_feature 1..57: note = Description of Artificial Sequence: Syntheticoligonucleotide
  source 1..57: mol_type = other RNA
gctggggaccgatcctgattgctcgctgcggcgagacattttgcattccagccctgg

SEQ ID NO: 1192 - RNA, 57 nt, synthetic construct
  misc_feature 1..57: note = Description of Artificial Sequence: Syntheticoligonucleotide
  source 1..57: mol_type = other RNA
gctggggaccgatcctgattgctcgctgcggcgagaccatccagtcagggtccatcc

SEQ ID NO: 1193 - RNA, 57 nt, synthetic construct
  misc_feature 1..57: note = Description of Artificial Sequence: Syntheticoligonucleotide
  source 1..57: mol_type = other RNA
gctggggaccgatcctgattgctcgctgcggcgagactccacgctgtaggctcccag

SEQ ID NO: 1194 - RNA, 57 nt, synthetic construct
  misc_feature 1..57: note = Description of Artificial Sequence: Syntheticoligonucleotide
  source 1..57: mol_type = other RNA
gctggggaccgatcctgattgctcgctgcggcgagacccacacacaggttgtccacg

SEQ ID NO: 1195 - RNA, 57 nt, synthetic construct
  misc_feature 1..57: note = Description of Artificial Sequence: Syntheticoligonucleotide
  source 1..57: mol_type = other RNA
gctggggaccgatcctgattgctcgctgcggcgagactccactggtcctgtctgctc

SEQ ID NO: 1196 - RNA, 57 nt, synthetic construct
  misc_feature 1..57: note = Description of Artificial Sequence: Syntheticoligonucleotide
  source 1..57: mol_type = other RNA
gctggggaccgatcctgattgctcgctgcggcgagacctgaaggccggctccggcag

SEQ ID NO: 1197 - DNA, 56 bp, synthetic construct
  misc_feature 1..56: note = Description of Artificial Sequence: Syntheticoligonucleotide
  source 1..56: mol_type = other DNA
ctttcaagactaatagattgctccttacgaggagacgaagctatgttttccatctc

SEQ ID NO: 1198 - DNA, 56 bp, synthetic construct
  misc_feature 1..56: note = Description of Artificial Sequence: Syntheticoligonucleotide
  source 1..56: mol_type = other DNA
ctttcaagactaatagattgctccttacgaggagacgcaggggcagccgccccctg

SEQ ID NO: 1199 - DNA, 56 bp, synthetic construct
  misc_feature 1..56: note = Description of Artificial Sequence: Syntheticoligonucleotide
  source 1..56: mol_type = other DNA
ctttcaagactaatagattgctccttacgaggagacctcctagaacccaacaggta

SEQ ID NO: 1200 - DNA, 56 bp, synthetic construct
  misc_feature 1..56: note = Description of Artificial Sequence: Syntheticoligonucleotide
  source 1..56: mol_type = other DNA
ctttcaagactaatagattgctccttacgaggagacgaaagacctcctctgtgtcc

SEQ ID NO: 1201 - DNA, 56 bp, synthetic construct
  misc_feature 1..56: note = Description of Artificial Sequence: Syntheticoligonucleotide
  source 1..56: mol_type = other DNA
ctttcaagactaatagattgctccttacgaggagactccatctcggggttggcagg

SEQ ID NO: 1202 - DNA, 56 bp, synthetic construct
  misc_feature 1..56: note = Description of Artificial Sequence: Syntheticoligonucleotide
  source 1..56: mol_type = other DNA
ctttcaagactaatagattgctccttacgaggagacttcctgatggtggagatgga

SEQ ID NO: 1203 - DNA, 56 bp, synthetic construct
  misc_feature 1..56: note = Description of Artificial Sequence: Syntheticoligonucleotide
  source 1..56: mol_type = other DNA
ctttcaagactaatagattgctccttacgaggagacctgactcccagctctgaccc

SEQ ID NO: 1204 - DNA, 56 bp, synthetic construct
  misc_feature 1..56: note = Description of Artificial Sequence: Syntheticoligonucleotide
  source 1..56: mol_type = other DNA
ctttcaagactaatagattgctccttacgaggagactggggtcagagctgggagtc

SEQ ID NO: 1205 - DNA, 56 bp, synthetic construct; identical to SEQ ID NO: 1200
  misc_feature 1..56: note = Description of Artificial Sequence: Syntheticoligonucleotide
  source 1..56: mol_type = other DNA

SEQ ID NO: 1206 - DNA, 56 bp, synthetic construct
  misc_feature 1..56: note = Description of Artificial Sequence: Syntheticoligonucleotide
  source 1..56: mol_type = other DNA
ctttcaagactaatagattgctccttacgaggagaccgaagctatgttttccatct

SEQ ID NO: 1207 - DNA, 56 bp, synthetic construct; identical to SEQ ID NO: 1197
  misc_feature 1..56: note = Description of Artificial Sequence: Syntheticoligonucleotide
  source 1..56: mol_type = other DNA

SEQ ID NO: 1208 - DNA, 56 bp, synthetic construct
  misc_feature 1..56: note = Description of Artificial Sequence: Syntheticoligonucleotide
  source 1..56: mol_type = other DNA
ctttcaagactaatagattgctccttacgaggagactccatctccaccatcaggaa

SEQ ID NO: 1209 - DNA, 56 bp, synthetic construct
  misc_feature 1..56: note = Description of Artificial Sequence: Syntheticoligonucleotide
  source 1..56: mol_type = other DNA
ctttcaagactaatagattgctccttacgaggagacccatctccaccatcaggaac

SEQ ID NO: 1210 - DNA, 56 bp, synthetic construct
  misc_feature 1..56: note = Description of Artificial Sequence: Syntheticoligonucleotide
  source 1..56: mol_type = other DNA
ctttcaagactaatagattgctccttacgaggagacctgatggtggagatggaaaa

SEQ ID NO: 1211 - DNA, 56 bp, synthetic construct
  misc_feature 1..56: note = Description of Artificial Sequence: Syntheticoligonucleotide
  source 1..56: mol_type = other DNA
ctttcaagactaatagattgctccttacgaggagaccatctccaccatcaggaaca

SEQ ID NO: 1212 - DNA, 56 bp, synthetic construct; identical to SEQ ID NO: 1202
  misc_feature 1..56: note = Description of Artificial Sequence: Syntheticoligonucleotide
  source 1..56: mol_type = other DNA

SEQ ID NO: 1213 - DNA, 56 bp, synthetic construct; identical to SEQ ID NO: 1198
  misc_feature 1..56: note = Description of Artificial Sequence: Syntheticoligonucleotide
  source 1..56: mol_type = other DNA

SEQ ID NO: 1214 - DNA, 56 bp, synthetic construct; identical to SEQ ID NO: 1201
  misc_feature 1..56: note = Description of Artificial Sequence: Syntheticoligonucleotide
  source 1..56: mol_type = other DNA

SEQ ID NO: 1215 - DNA, 56 bp, synthetic construct
  misc_feature 1..56: note = Description of Artificial Sequence: Syntheticoligonucleotide
  source 1..56: mol_type = other DNA
ctttcaagactaatagattgctccttacgaggagactaggagcaaattgtccatct

SEQ ID NO: 1216 - DNA, 56 bp, synthetic construct
  misc_feature 1..56: note = Description of Artificial Sequence: Syntheticoligonucleotide
  source 1..56: mol_type = other DNA
ctttcaagactaatagattgctccttacgaggagacggttctaggagcaaattgtc

SEQ ID NO: 1217 - DNA, 56 bp, synthetic construct
  misc_feature 1..56: note = Description of Artificial Sequence: Syntheticoligonucleotide
  source 1..56: mol_type = other DNA
ctttcaagactaatagattgctccttacgaggagacgctcctagaacccaacaggt

SEQ ID NO: 1218 - DNA, 56 bp, synthetic construct; identical to SEQ ID NO: 1199
  misc_feature 1..56: note = Description of Artificial Sequence: Syntheticoligonucleotide
  source 1..56: mol_type = other DNA

SEQ ID NO: 1219 - DNA, 56 bp, synthetic construct
  misc_feature 1..56: note = Description of Artificial Sequence: Syntheticoligonucleotide
  source 1..56: mol_type = other DNA
ctttcaagactaatagattgctccttacgaggagactccagacgccatctttcagg

SEQ ID NO: 1220 - DNA, 56 bp, synthetic construct
  misc_feature 1..56: note = Description of Artificial Sequence: Syntheticoligonucleotide
  source 1..56: mol_type = other DNA
ctttcaagactaatagattgctccttacgaggagactggtaagagtcctcctgccc

SEQ ID NO: 1221 - DNA, 56 bp, synthetic construct
  misc_feature 1..56: note = Description of Artificial Sequence: Syntheticoligonucleotide
  source 1..56: mol_type = other DNA
ctttcaagactaatagattgctccttacgaggagacttacagcatcttgggtcagg

SEQ ID NO: 1222 - DNA, 56 bp, synthetic construct
  misc_feature 1..56: note = Description of Artificial Sequence: Syntheticoligonucleotide
  source 1..56: mol_type = other DNA
ctttcaagactaatagattgctccttacgaggagacggtcaggtgggccggcagct

SEQ ID NO: 1223 - DNA, 56 bp, synthetic construct
  misc_feature 1..56: note = Description of Artificial Sequence: Syntheticoligonucleotide
  source 1..56: mol_type = other DNA
ctttcaagactaatagattgctccttacgaggagacctatcattggagatgacatt

SEQ ID NO: 1224 - DNA, 56 bp, synthetic construct
  misc_feature 1..56: note = Description of Artificial Sequence: Syntheticoligonucleotide
  source 1..56: mol_type = other DNA
ctttcaagactaatagattgctccttacgaggagacgagatgacattaaccggaga

SEQ ID NO: 1225 - DNA, 56 bp, synthetic construct
  misc_feature 1..56: note = Description of Artificial Sequence: Syntheticoligonucleotide
  source 1..56: mol_type = other DNA
ctttcaagactaatagattgctccttacgaggagactggaactctgtgtcgtatct

SEQ ID NO: 1226 - DNA, 56 bp, synthetic construct
  misc_feature 1..56: note = Description of Artificial Sequence: Syntheticoligonucleotide
  source 1..56: mol_type = other DNA
ctttcaagactaatagattgctccttacgaggagaccagaatttactggagcagct

SEQ ID NO: 1227 - DNA, 56 bp, synthetic construct
  misc_feature 1..56: note = Description of Artificial Sequence: Syntheticoligonucleotide
  source 1..56: mol_type = other DNA
ctttcaagactaatagattgctccttacgaggagacactggagcagctgcagccca

SEQ ID NO: 1228 - DNA, 56 bp, synthetic construct
  misc_feature 1..56: note = Description of Artificial Sequence: Syntheticoligonucleotide
  source 1..56: mol_type = other DNA
ctttcaagactaatagattgctccttacgaggagacccagctgtgggctgcagctg

SEQ ID NO: 1229 - DNA, 56 bp, synthetic construct
  misc_feature 1..56: note = Description of Artificial Sequence: Syntheticoligonucleotide
  source 1..56: mol_type = other DNA
ctttcaagactaatagattgctccttacgaggagacgtaggcattcccagctgtgg

SEQ ID NO: 1230 - DNA, 56 bp, synthetic construct
  misc_feature 1..56: note = Description of Artificial Sequence: Syntheticoligonucleotide
  source 1..56: mol_type = other DNA
ctttcaagactaatagattgctccttacgaggagacgtgaagagttcgtaggcatt

SEQ ID NO: 1231 - DNA, 56 bp, synthetic construct
  misc_feature 1..56: note = Description of Artificial Sequence: Syntheticoligonucleotide
  source 1..56: mol_type = other DNA
ctttcaagactaatagattgctccttacgaggagacaccaagattgcctccaggta

SEQ ID NO: 1232 - DNA, 56 bp, synthetic construct
  misc_feature 1..56: note = Description of Artificial Sequence: Syntheticoligonucleotide
  source 1..56: mol_type = other DNA
ctttcaagactaatagattgctccttacgaggagaccctccaggtacccaccacca

SEQ ID NO: 1233 - DNA, 57 bp, synthetic construct
  misc_feature 1..57: note = Description of Artificial Sequence: Syntheticoligonucleotide
  source 1..57: mol_type = other DNA
gctggggaccgatcctgattgctcgctgcggcgagacgaagctatgttttccatctc

SEQ ID NO: 1234 - DNA, 57 bp, synthetic construct
  misc_feature 1..57: note = Description of Artificial Sequence: Syntheticoligonucleotide
  source 1..57: mol_type = other DNA
gctggggaccgatcctgattgctcgctgcggcgagacgcaggggcagccgccccctg

SEQ ID NO: 1235 - DNA, 57 bp, synthetic construct
  misc_feature 1..57: note = Description of Artificial Sequence: Syntheticoligonucleotide
  source 1..57: mol_type = other DNA
gctggggaccgatcctgattgctcgctgcggcgagacctcctagaacccaacaggta

SEQ ID NO: 1236 - DNA, 57 bp, synthetic construct
  misc_feature 1..57: note = Description of Artificial Sequence: Syntheticoligonucleotide
  source 1..57: mol_type = other DNA
gctggggaccgatcctgattgctcgctgcggcgagacgaaagacctcctctgtgtcc

SEQ ID NO: 1237 - DNA, 57 bp, synthetic construct
  misc_feature 1..57: note = Description of Artificial Sequence: Syntheticoligonucleotide
  source 1..57: mol_type = other DNA
gctggggaccgatcctgattgctcgctgcggcgagactccatctcggggttggcagg

SEQ ID NO: 1238 - DNA, 57 bp, synthetic construct
  misc_feature 1..57: note = Description of Artificial Sequence: Syntheticoligonucleotide
  source 1..57: mol_type = other DNA
gctggggaccgatcctgattgctcgctgcggcgagacttcctgatggtggagatgga

SEQ ID NO: 1239 - DNA, 57 bp, synthetic construct
  misc_feature 1..57: note = Description of Artificial Sequence: Syntheticoligonucleotide
  source 1..57: mol_type = other DNA
gctggggaccgatcctgattgctcgctgcggcgagacctgactcccagctctgaccc

SEQ ID NO: 1240 - DNA, 57 bp, synthetic construct
  misc_feature 1..57: note = Description of Artificial Sequence: Syntheticoligonucleotide
  source 1..57: mol_type = other DNA
gctggggaccgatcctgattgctcgctgcggcgagactggggtcagagctgggagtc

SEQ ID NO: 1241 - DNA, 57 bp, synthetic construct; identical to SEQ ID NO: 1236
  misc_feature 1..57: note = Description of Artificial Sequence: Syntheticoligonucleotide
  source 1..57: mol_type = other DNA

SEQ ID NO: 1242 - DNA, 57 bp, synthetic construct
  misc_feature 1..57: note = Description of Artificial Sequence: Syntheticoligonucleotide
  source 1..57: mol_type = other DNA
gctggggaccgatcctgattgctcgctgcggcgagaccgaagctatgttttccatct

SEQ ID NO: 1243 - DNA, 57 bp, synthetic construct; identical to SEQ ID NO: 1233
  misc_feature 1..57: note = Description of Artificial Sequence: Syntheticoligonucleotide
  source 1..57: mol_type = other DNA

SEQ ID NO: 1244 - DNA, 57 bp, synthetic construct
  misc_feature 1..57: note = Description of Artificial Sequence: Syntheticoligonucleotide
  source 1..57: mol_type = other DNA
gctggggaccgatcctgattgctcgctgcggcgagactccatctccaccatcaggaa

SEQ ID NO: 1245 - DNA, 57 bp, synthetic construct
  misc_feature 1..57: note = Description of Artificial Sequence: Syntheticoligonucleotide
  source 1..57: mol_type = other DNA
gctggggaccgatcctgattgctcgctgcggcgagacccatctccaccatcaggaac

SEQ ID NO: 1246 - DNA, 57 bp, synthetic construct
  misc_feature 1..57: note = Description of Artificial Sequence: Syntheticoligonucleotide
  source 1..57: mol_type = other DNA
gctggggaccgatcctgattgctcgctgcggcgagacctgatggtggagatggaaaa

SEQ ID NO: 1247 - DNA, 57 bp, synthetic construct
  misc_feature 1..57: note = Description of Artificial Sequence: Syntheticoligonucleotide
  source 1..57: mol_type = other DNA
gctggggaccgatcctgattgctcgctgcggcgagaccatctccaccatcaggaaca

SEQ ID NO: 1248 - DNA, 57 bp, synthetic construct; identical to SEQ ID NO: 1238
  misc_feature 1..57: note = Description of Artificial Sequence: Syntheticoligonucleotide
  source 1..57: mol_type = other DNA

SEQ ID NO: 1249 - DNA, 57 bp, synthetic construct; identical to SEQ ID NO: 1234
  misc_feature 1..57: note = Description of Artificial Sequence: Syntheticoligonucleotide
  source 1..57: mol_type = other DNA

SEQ ID NO: 1250 - DNA, 57 bp, synthetic construct; identical to SEQ ID NO: 1237
  misc_feature 1..57: note = Description of Artificial Sequence: Syntheticoligonucleotide
  source 1..57: mol_type = other DNA

SEQ ID NO: 1251 - DNA, 57 bp, synthetic construct
  misc_feature 1..57: note = Description of Artificial Sequence: Syntheticoligonucleotide
  source 1..57: mol_type = other DNA
gctggggaccgatcctgattgctcgctgcggcgagactaggagcaaattgtccatct

SEQ ID NO: 1252 - DNA, 57 bp, synthetic construct
  misc_feature 1..57: note = Description of Artificial Sequence: Syntheticoligonucleotide
  source 1..57: mol_type = other DNA
gctggggaccgatcctgattgctcgctgcggcgagacggttctaggagcaaattgtc

SEQ ID NO: 1253 - DNA, 57 bp, synthetic construct
  misc_feature 1..57: note = Description of Artificial Sequence: Syntheticoligonucleotide
  source 1..57: mol_type = other DNA
gctggggaccgatcctgattgctcgctgcggcgagacgctcctagaacccaacaggt

SEQ ID NO: 1254 - DNA, 57 bp, synthetic construct; identical to SEQ ID NO: 1235
  misc_feature 1..57: note = Description of Artificial Sequence: Syntheticoligonucleotide
  source 1..57: mol_type = other DNA

SEQ ID NO: 1255 - DNA, 57 bp, synthetic construct
  misc_feature 1..57: note = Description of Artificial Sequence: Syntheticoligonucleotide
  source 1..57: mol_type = other DNA
gctggggaccgatcctgattgctcgctgcggcgagactccagacgccatctttcagg

SEQ ID NO: 1256 - DNA, 57 bp, synthetic construct
  misc_feature 1..57: note = Description of Artificial Sequence: Syntheticoligonucleotide
  source 1..57: mol_type = other DNA
gctggggaccgatcctgattgctcgctgcggcgagactggtaagagtcctcctgccc

SEQ ID NO: 1257 - DNA, 57 bp, synthetic construct
  misc_feature 1..57: note = Description of Artificial Sequence: Syntheticoligonucleotide
  source 1..57: mol_type = other DNA
gctggggaccgatcctgattgctcgctgcggcgagacttacagcatcttgggtcagg

SEQ ID NO: 1258 - DNA, 57 bp, synthetic construct
  misc_feature 1..57: note = Description of Artificial Sequence: Syntheticoligonucleotide
  source 1..57: mol_type = other DNA
gctggggaccgatcctgattgctcgctgcggcgagacggtcaggtgggccggcagct

SEQ ID NO: 1259 - DNA, 57 bp, synthetic construct
  misc_feature 1..57: note = Description of Artificial Sequence: Syntheticoligonucleotide
  source 1..57: mol_type = other DNA
gctggggaccgatcctgattgctcgctgcggcgagacctatcattggagatgacatt

SEQ ID NO: 1260 - DNA, 57 bp, synthetic construct
  misc_feature 1..57: note = Description of Artificial Sequence: Syntheticoligonucleotide
  source 1..57: mol_type = other DNA
gctggggaccgatcctgattgctcgctgcggcgagacgagatgacattaaccggaga

SEQ ID NO: 1261 - DNA, 57 bp, synthetic construct
  misc_feature 1..57: note = Description of Artificial Sequence: Syntheticoligonucleotide
  source 1..57: mol_type = other DNA
gctggggaccgatcctgattgctcgctgcggcgagactggaactctgtgtcgtatct

SEQ ID NO: 1262 - DNA, 57 bp, synthetic construct
  misc_feature 1..57: note = Description of Artificial Sequence: Syntheticoligonucleotide
  source 1..57: mol_type = other DNA
gctggggaccgatcctgattgctcgctgcggcgagaccagaatttactggagcagct

SEQ ID NO: 1263 - DNA, 57 bp, synthetic construct
  misc_feature 1..57: note = Description of Artificial Sequence: Syntheticoligonucleotide
  source 1..57: mol_type = other DNA
gctggggaccgatcctgattgctcgctgcggcgagacactggagcagctgcagccca

SEQ ID NO: 1264 - DNA, 57 bp, synthetic construct
  misc_feature 1..57: note = Description of Artificial Sequence: Syntheticoligonucleotide
  source 1..57: mol_type = other DNA
gctggggaccgatcctgattgctcgctgcggcgagacccagctgtgggctgcagctg

SEQ ID NO: 1265 - DNA, 57 bp, synthetic construct
  misc_feature 1..57: note = Description of Artificial Sequence: Syntheticoligonucleotide
  source 1..57: mol_type = other DNA
gctggggaccgatcctgattgctcgctgcggcgagacgtaggcattcccagctgtgg

SEQ ID NO: 1266 - DNA, 57 bp, synthetic construct
  misc_feature 1..57: note = Description of Artificial Sequence: Syntheticoligonucleotide
  source 1..57: mol_type = other DNA
gctggggaccgatcctgattgctcgctgcggcgagacgtgaagagttcgtaggcatt

SEQ ID NO: 1267 - DNA, 57 bp, synthetic construct
  misc_feature 1..57: note = Description of Artificial Sequence: Syntheticoligonucleotide
  source 1..57: mol_type = other DNA
gctggggaccgatcctgattgctcgctgcggcgagacaccaagattgcctccaggta

SEQ ID NO: 1268 - DNA, 57 bp, synthetic construct
  misc_feature 1..57: note = Description of Artificial Sequence: Syntheticoligonucleotide
  source 1..57: mol_type = other DNA
gctggggaccgatcctgattgctcgctgcggcgagaccctccaggtacccaccacca

SEQ ID NO: 1269 - DNA, 56 bp, synthetic construct
  misc_feature 1..56: note = Description of Artificial Sequence: Syntheticoligonucleotide
  source 1..56: mol_type = other DNA
ctttcaagactaatagattgctccttacgaggagacctaatgtggatactaactcc

SEQ ID NO: 1270 - DNA, 56 bp, synthetic construct
  misc_feature 1..56: note = Description of Artificial Sequence: Syntheticoligonucleotide
  source 1..56: mol_type = other DNA
ctttcaagactaatagattgctccttacgaggagacttccgtgtggcagctgacat

SEQ ID NO: 1271 - DNA, 56 bp, synthetic construct
  misc_feature 1..56: note = Description of Artificial Sequence: Syntheticoligonucleotide
  source 1..56: mol_type = other DNA
ctttcaagactaatagattgctccttacgaggagacctgatggcaacttcaactgg

SEQ ID NO: 1272 - DNA, 56 bp, synthetic construct
  misc_feature 1..56: note = Description of Artificial Sequence: Syntheticoligonucleotide
  source 1..56: mol_type = other DNA
ctttcaagactaatagattgctccttacgaggagactactttgctagcaaactggt

SEQ ID NO: 1273 - DNA, 56 bp, synthetic construct
  misc_feature 1..56: note = Description of Artificial Sequence: Syntheticoligonucleotide
  source 1..56: mol_type = other DNA
ctttcaagactaatagattgctccttacgaggagacagcaccagtttgctagcaaa

SEQ ID NO: 1274 - DNA, 56 bp, synthetic construct
  misc_feature 1..56: note = Description of Artificial Sequence: Syntheticoligonucleotide
  source 1..56: mol_type = other DNA
ctttcaagactaatagattgctccttacgaggagacaactggggccgggttgttgc

SEQ ID NO: 1275 - DNA, 56 bp, synthetic construct
  misc_feature 1..56: note = Description of Artificial Sequence: Syntheticoligonucleotide
  source 1..56: mol_type = other DNA
ctttcaagactaatagattgctccttacgaggagacttctctttcctgtaggatga

SEQ ID NO: 1276 - DNA, 56 bp, synthetic construct
  misc_feature 1..56: note = Description of Artificial Sequence: Syntheticoligonucleotide
  source 1..56: mol_type = other DNA
ctttcaagactaatagattgctccttacgaggagactctttcctgtaggatgattg

SEQ ID NO: 1277 - DNA, 56 bp, synthetic construct
  misc_feature 1..56: note = Description of Artificial Sequence: Syntheticoligonucleotide
  source 1..56: mol_type = other DNA
ctttcaagactaatagattgctccttacgaggagaccctgtaggatgattgctaat

SEQ ID NO: 1278 - DNA, 56 bp, synthetic construct
  misc_feature 1..56: note = Description of Artificial Sequence: Syntheticoligonucleotide
  source 1..56: mol_type = other DNA
ctttcaagactaatagattgctccttacgaggagacctgtaggatgattgctaatg

SEQ ID NO: 1279 - DNA, 56 bp, synthetic construct; identical to SEQ ID NO: 1269
  misc_feature 1..56: note = Description of Artificial Sequence: Syntheticoligonucleotide
  source 1..56: mol_type = other DNA

SEQ ID NO: 1280 - DNA, 56 bp, synthetic construct; identical to SEQ ID NO: 1270
  misc_feature 1..56: note = Description of Artificial Sequence: Syntheticoligonucleotide
  source 1..56: mol_type = other DNA

SEQ ID NO: 1281 - DNA, 56 bp, synthetic construct
  misc_feature 1..56: note = Description of Artificial Sequence: Syntheticoligonucleotide
  source 1..56: mol_type = other DNA
ctttcaagactaatagattgctccttacgaggagaccgtgtggcagctgacatgtt

SEQ ID NO: 1282 - DNA, 56 bp, synthetic construct
  misc_feature 1..56: note = Description of Artificial Sequence: Syntheticoligonucleotide
  source 1..56: mol_type = other DNA
ctttcaagactaatagattgctccttacgaggagacccatcagcaaacatgtcagc

SEQ ID NO: 1283 - DNA, 56 bp, synthetic construct
  misc_feature 1..56: note = Description of Artificial Sequence: Syntheticoligonucleotide
  source 1..56: mol_type = other DNA
ctttcaagactaatagattgctccttacgaggagacaagttgccatcagcaaacat

SEQ ID NO: 1284 - DNA, 56 bp, synthetic construct
  misc_feature 1..56: note = Description of Artificial Sequence: Syntheticoligonucleotide
  source 1..56: mol_type = other DNA
ctttcaagactaatagattgctccttacgaggagacgctgatggcaacttcaactg

SEQ ID NO: 1285 - DNA, 56 bp, synthetic construct; identical to SEQ ID NO: 1271
  misc_feature 1..56: note = Description of Artificial Sequence: Syntheticoligonucleotide
  source 1..56: mol_type = other DNA

SEQ ID NO: 1286 - DNA, 56 bp, synthetic construct; identical to SEQ ID NO: 1274
  misc_feature 1..56: note = Description of Artificial Sequence: Syntheticoligonucleotide
  source 1..56: mol_type = other DNA

SEQ ID NO: 1287 - DNA, 56 bp, synthetic construct
  misc_feature 1..56: note = Description of Artificial Sequence: Syntheticoligonucleotide
  source 1..56: mol_type = other DNA
ctttcaagactaatagattgctccttacgaggagacttgcccttttctactttgct

SEQ ID NO: 1288 - DNA, 56 bp, synthetic construct
  misc_feature 1..56: note = Description of Artificial Sequence: Syntheticoligonucleotide
  source 1..56: mol_type = other DNA
ctttcaagactaatagattgctccttacgaggagaccccttttctactttgctagc

SEQ ID NO: 1289 - DNA, 56 bp, synthetic construct
  misc_feature 1..56: note = Description of Artificial Sequence: Syntheticoligonucleotide
  source 1..56: mol_type = other DNA
ctttcaagactaatagattgctccttacgaggagacctagcaaagtagaaaagggc

SEQ ID NO: 1290 - DNA, 56 bp, synthetic construct
  misc_feature 1..56: note = Description of Artificial Sequence: Syntheticoligonucleotide
  source 1..56: mol_type = other DNA
ctttcaagactaatagattgctccttacgaggagacgctagcaaagtagaaaaggg

SEQ ID NO: 1291 - DNA, 56 bp, synthetic construct
  misc_feature 1..56: note = Description of Artificial Sequence: Syntheticoligonucleotide
  source 1..56: mol_type = other DNA
ctttcaagactaatagattgctccttacgaggagactctactttgctagcaaactg

SEQ ID NO: 1292 - DNA, 56 bp, synthetic construct
  misc_feature 1..56: note = Description of Artificial Sequence: Syntheticoligonucleotide
  source 1..56: mol_type = other DNA
ctttcaagactaatagattgctccttacgaggagacctactttgctagcaaactgg

SEQ ID NO: 1293 - DNA, 56 bp, synthetic construct; identical to SEQ ID NO: 1272
  misc_feature 1..56: note = Description of Artificial Sequence: Syntheticoligonucleotide
  source 1..56: mol_type = other DNA

SEQ ID NO: 1294 - DNA, 56 bp, synthetic construct
  misc_feature 1..56: note = Description of Artificial Sequence: Syntheticoligonucleotide
  source 1..56: mol_type = other DNA
ctttcaagactaatagattgctccttacgaggagacgctagcaaactggtgctcaa

SEQ ID NO: 1295 - DNA, 56 bp, synthetic construct
  misc_feature 1..56: note = Description of Artificial Sequence: Syntheticoligonucleotide
  source 1..56: mol_type = other DNA
ctttcaagactaatagattgctccttacgaggagacctagcaaactggtgctcaag

SEQ ID NO: 1296 - DNA, 56 bp, synthetic construct; identical to SEQ ID NO: 1273
  misc_feature 1..56: note = Description of Artificial Sequence: Syntheticoligonucleotide
  source 1..56: mol_type = other DNA

SEQ ID NO: 1297 - DNA, 57 bp, synthetic construct
  misc_feature 1..57: note = Description of Artificial Sequence: Syntheticoligonucleotide
  source 1..57: mol_type = other DNA
gctggggaccgatcctgattgctcgctgcggcgagacctaatgtggatactaactcc

SEQ ID NO: 1298 - DNA, 57 bp, synthetic construct
  misc_feature 1..57: note = Description of Artificial Sequence: Syntheticoligonucleotide
  source 1..57: mol_type = other DNA
gctggggaccgatcctgattgctcgctgcggcgagacttccgtgtggcagctgacat

SEQ ID NO: 1299 - DNA, 57 bp, synthetic construct
  misc_feature 1..57: note = Description of Artificial Sequence: Syntheticoligonucleotide
  source 1..57: mol_type = other DNA
gctggggaccgatcctgattgctcgctgcggcgagacctgatggcaacttcaactgg

SEQ ID NO: 1300 - DNA, 57 bp, synthetic construct
  misc_feature 1..57: note = Description of Artificial Sequence: Syntheticoligonucleotide
  source 1..57: mol_type = other DNA
gctggggaccgatcctgattgctcgctgcggcgagactactttgctagcaaactggt

SEQ ID NO: 1301 - DNA, 57 bp, synthetic construct
  misc_feature 1..57: note = Description of Artificial Sequence: Syntheticoligonucleotide
  source 1..57: mol_type = other DNA
gctggggaccgatcctgattgctcgctgcggcgagacagcaccagtttgctagcaaa

SEQ ID NO: 1302 - DNA, 57 bp, synthetic construct
  misc_feature 1..57: note = Description of Artificial Sequence: Syntheticoligonucleotide
  source 1..57: mol_type = other DNA
gctggggaccgatcctgattgctcgctgcggcgagacaactggggccgggttgttgc

SEQ ID NO: 1303 - DNA, 57 bp, synthetic construct
  misc_feature 1..57: note = Description of Artificial Sequence: Syntheticoligonucleotide
  source 1..57: mol_type = other DNA
gctggggaccgatcctgattgctcgctgcggcgagacttctctttcctgtaggatga

SEQ ID NO: 1304 - DNA, 57 bp, synthetic construct
  misc_feature 1..57: note = Description of Artificial Sequence: Syntheticoligonucleotide
  source 1..57: mol_type = other DNA
gctggggaccgatcctgattgctcgctgcggcgagactctttcctgtaggatgattg

SEQ ID NO: 1305 - DNA, 57 bp, synthetic construct
  misc_feature 1..57: note = Description of Artificial Sequence: Syntheticoligonucleotide
  source 1..57: mol_type = other DNA
gctggggaccgatcctgattgctcgctgcggcgagaccctgtaggatgattgctaat

SEQ ID NO: 1306 - DNA, 57 bp, synthetic construct
  misc_feature 1..57: note = Description of Artificial Sequence: Syntheticoligonucleotide
  source 1..57: mol_type = other DNA
gctggggaccgatcctgattgctcgctgcggcgagacctgtaggatgattgctaatg

SEQ ID NO: 1307 - DNA, 57 bp, synthetic construct; identical to SEQ ID NO: 1297
  misc_feature 1..57: note = Description of Artificial Sequence: Syntheticoligonucleotide
  source 1..57: mol_type = other DNA

SEQ ID NO: 1308 - DNA, 57 bp, synthetic construct; identical to SEQ ID NO: 1298
  misc_feature 1..57: note = Description of Artificial Sequence: Syntheticoligonucleotide
  source 1..57: mol_type = other DNA

SEQ ID NO: 1309 - DNA, 57 bp, synthetic construct
  misc_feature 1..57: note = Description of Artificial Sequence: Syntheticoligonucleotide
  source 1..57: mol_type = other DNA
gctggggaccgatcctgattgctcgctgcggcgagaccgtgtggcagctgacatgtt

SEQ ID NO: 1310 - DNA, 57 bp, synthetic construct
  misc_feature 1..57: note = Description of Artificial Sequence: Syntheticoligonucleotide
  source 1..57: mol_type = other DNA
gctggggaccgatcctgattgctcgctgcggcgagacccatcagcaaacatgtcagc

SEQ ID NO: 1311 - DNA, 57 bp, synthetic construct
  misc_feature 1..57: note = Description of Artificial Sequence: Syntheticoligonucleotide
  source 1..57: mol_type = other DNA
gctggggaccgatcctgattgctcgctgcggcgagacaagttgccatcagcaaacat

SEQ ID NO: 1312 - DNA, 57 bp, synthetic construct
  misc_feature 1..57: note = Description of Artificial Sequence: Syntheticoligonucleotide
  source 1..57: mol_type = other DNA
gctggggaccgatcctgattgctcgctgcggcgagacgctgatggcaacttcaactg

SEQ ID NO: 1313 - DNA, 57 bp, synthetic construct; identical to SEQ ID NO: 1299
  misc_feature 1..57: note = Description of Artificial Sequence: Syntheticoligonucleotide
  source 1..57: mol_type = other DNA

SEQ ID NO: 1314 - DNA, 57 bp, synthetic construct; identical to SEQ ID NO: 1302
  misc_feature 1..57: note = Description of Artificial Sequence: Syntheticoligonucleotide
  source 1..57: mol_type = other DNA

SEQ ID NO: 1315 - DNA, 57 bp, synthetic construct
  misc_feature 1..57: note = Description of Artificial Sequence: Syntheticoligonucleotide
  source 1..57: mol_type = other DNA
gctggggaccgatcctgattgctcgctgcggcgagacttgcccttttctactttgct

SEQ ID NO: 1316 - DNA, 57 bp, synthetic construct
  misc_feature 1..57: note = Description of Artificial Sequence: Syntheticoligonucleotide
  source 1..57: mol_type = other DNA
gctggggaccgatcctgattgctcgctgcggcgagaccccttttctactttgctagc

SEQ ID NO: 1317 - DNA, 57 bp, synthetic construct
  misc_feature 1..57: note = Description of Artificial Sequence: Syntheticoligonucleotide
  source 1..57: mol_type = other DNA
gctggggaccgatcctgattgctcgctgcggcgagacctagcaaagtagaaaagggc

SEQ ID NO: 1318 - DNA, 57 bp, synthetic construct
  misc_feature 1..57: note = Description of Artificial Sequence: Syntheticoligonucleotide
  source 1..57: mol_type = other DNA
gctggggaccgatcctgattgctcgctgcggcgagacgctagcaaagtagaaaaggg

SEQ ID NO: 1319 - DNA, 57 bp, synthetic construct
  misc_feature 1..57: note = Description of Artificial Sequence: Syntheticoligonucleotide
  source 1..57: mol_type = other DNA
gctggggaccgatcctgattgctcgctgcggcgagactctactttgctagcaaactg

SEQ ID NO: 1320 - DNA, 57 bp, synthetic construct
  misc_feature 1..57: note = Description of Artificial Sequence: Syntheticoligonucleotide
  source 1..57: mol_type = other DNA
gctggggaccgatcctgattgctcgctgcggcgagacctactttgctagcaaactgg

SEQ ID NO: 1321 - DNA, 57 bp, synthetic construct; identical to SEQ ID NO: 1300
  misc_feature 1..57: note = Description of Artificial Sequence: Syntheticoligonucleotide
  source 1..57: mol_type = other DNA

SEQ ID NO: 1322 - DNA, 57 bp, synthetic construct
  misc_feature 1..57: note = Description of Artificial Sequence: Syntheticoligonucleotide
  source 1..57: mol_type = other DNA
gctggggaccgatcctgattgctcgctgcggcgagacgctagcaaactggtgctcaa

SEQ ID NO: 1323 - DNA, 57 bp, synthetic construct
  misc_feature 1..57: note = Description of Artificial Sequence: Syntheticoligonucleotide
  source 1..57: mol_type = other DNA
gctggggaccgatcctgattgctcgctgcggcgagacctagcaaactggtgctcaag

SEQ ID NO: 1324 - DNA, 57 bp, synthetic construct; identical to SEQ ID NO: 1301
  misc_feature 1..57: note = Description of Artificial Sequence: Syntheticoligonucleotide
  source 1..57: mol_type = other DNA

SEQ ID NO: 1325 - DNA, 56 bp, synthetic construct
  misc_feature 1..56: note = Description of Artificial Sequence: Syntheticoligonucleotide
  source 1..56: mol_type = other DNA
ctttcaagactaatagattgctccttacgaggagacccactttgtcagtgcgtctg

SEQ ID NO: 1326 - DNA, 56 bp, synthetic construct
  misc_feature 1..56: note = Description of Artificial Sequence: Syntheticoligonucleotide
  source 1..56: mol_type = other DNA
ctttcaagactaatagattgctccttacgaggagacctcaatgggatggaaggctg

SEQ ID NO: 1327 - DNA, 56 bp, synthetic construct
  misc_feature 1..56: note = Description of Artificial Sequence: Syntheticoligonucleotide
  source 1..56: mol_type = other DNA
ctttcaagactaatagattgctccttacgaggagacaggaatacatggtacacgtt

SEQ ID NO: 1328 - DNA, 56 bp, synthetic construct
  misc_feature 1..56: note = Description of Artificial Sequence: Syntheticoligonucleotide
  source 1..56: mol_type = other DNA
ctttcaagactaatagattgctccttacgaggagacaagaacattttcagcttctc

SEQ ID NO: 1329 - DNA, 56 bp, synthetic construct
  misc_feature 1..56: note = Description of Artificial Sequence: Syntheticoligonucleotide
  source 1..56: mol_type = other DNA
ctttcaagactaatagattgctccttacgaggagacatccactttcattctgcgtt

SEQ ID NO: 1330 - DNA, 56 bp, synthetic construct
  misc_feature 1..56: note = Description of Artificial Sequence: Syntheticoligonucleotide
  source 1..56: mol_type = other DNA
ctttcaagactaatagattgctccttacgaggagactttgttaaaggaggcaaaga

SEQ ID NO: 1331 - DNA, 56 bp, synthetic construct
  misc_feature 1..56: note = Description of Artificial Sequence: Syntheticoligonucleotide
  source 1..56: mol_type = other DNA
ctttcaagactaatagattgctccttacgaggagactccccagagtccatgtcaga

SEQ ID NO: 1332 - DNA, 56 bp, synthetic construct
  misc_feature 1..56: note = Description of Artificial Sequence: Syntheticoligonucleotide
  source 1..56: mol_type = other DNA
ctttcaagactaatagattgctccttacgaggagactcagtgcgtctgacatggac

SEQ ID NO: 1333 - DNA, 56 bp, synthetic construct
  misc_feature 1..56: note = Description of Artificial Sequence: Syntheticoligonucleotide
  source 1..56: mol_type = other DNA
ctttcaagactaatagattgctccttacgaggagacgtcagtgcgtctgacatgga

SEQ ID NO: 1334 - DNA, 56 bp, synthetic construct; identical to SEQ ID NO: 1325
  misc_feature 1..56: note = Description of Artificial Sequence: Syntheticoligonucleotide
  source 1..56: mol_type = other DNA

SEQ ID NO: 1335 - DNA, 56 bp, synthetic construct
  misc_feature 1..56: note = Description of Artificial Sequence: Syntheticoligonucleotide
  source 1..56: mol_type = other DNA
ctttcaagactaatagattgctccttacgaggagactgttcccactttgtcagtgc

SEQ ID NO: 1336 - DNA, 56 bp, synthetic construct; identical to SEQ ID NO: 1326
  misc_feature 1..56: note = Description of Artificial Sequence: Syntheticoligonucleotide
  source 1..56: mol_type = other DNA

SEQ ID NO: 1337 - DNA, 56 bp, synthetic construct
  misc_feature 1..56: note = Description of Artificial Sequence: Syntheticoligonucleotide
  source 1..56: mol_type = other DNA
ctttcaagactaatagattgctccttacgaggagaccatcccattgaggaatacat

SEQ ID NO: 1338 - DNA, 56 bp, synthetic construct; identical to SEQ ID NO: 1327
  misc_feature 1..56: note = Description of Artificial Sequence: Syntheticoligonucleotide
  source 1..56: mol_type = other DNA

SEQ ID NO: 1339 - DNA, 56 bp, synthetic construct
  misc_feature 1..56: note = Description of Artificial Sequence: Syntheticoligonucleotide
  source 1..56: mol_type = other DNA
ctttcaagactaatagattgctccttacgaggagacaacgtgtaccatgtattcct

SEQ ID NO: 1340 - DNA, 56 bp, synthetic construct
  misc_feature 1..56: note = Description of Artificial Sequence: Syntheticoligonucleotide
  source 1..56: mol_type = other DNA
ctttcaagactaatagattgctccttacgaggagacttcaacgtgtaccatgtatt

SEQ ID NO: 1341 - DNA, 56 bp, synthetic construct; identical to SEQ ID NO: 1328
  misc_feature 1..56: note = Description of Artificial Sequence: Syntheticoligonucleotide
  source 1..56: mol_type = other DNA

SEQ ID NO: 1342 - DNA, 56 bp, synthetic construct
  misc_feature 1..56: note = Description of Artificial Sequence: Syntheticoligonucleotide
  source 1..56: mol_type = other DNA
ctttcaagactaatagattgctccttacgaggagacgagaagctgaaaatgttctt

SEQ ID NO: 1343 - DNA, 56 bp, synthetic construct
  misc_feature 1..56: note = Description of Artificial Sequence: Syntheticoligonucleotide
  source 1..56: mol_type = other DNA
ctttcaagactaatagattgctccttacgaggagactcagcttctcgaacgcagaa

SEQ ID NO: 1344 - DNA, 56 bp, synthetic construct
  misc_feature 1..56: note = Description of Artificial Sequence: Syntheticoligonucleotide
  source 1..56: mol_type = other DNA
ctttcaagactaatagattgctccttacgaggagaccagcttctcgaacgcagaat

SEQ ID NO: 1345 - DNA, 56 bp, synthetic construct
  misc_feature 1..56: note = Description of Artificial Sequence: Syntheticoligonucleotide
  source 1..56: mol_type = other DNA
ctttcaagactaatagattgctccttacgaggagactgcgttcgagaagctgaaaa

SEQ ID NO: 1346 - DNA, 56 bp, synthetic construct
  misc_feature 1..56: note = Description of Artificial Sequence: Syntheticoligonucleotide
  source 1..56: mol_type = other DNA
ctttcaagactaatagattgctccttacgaggagacagcttctcgaacgcagaatg

SEQ ID NO: 1347 - DNA, 56 bp, synthetic construct
  misc_feature 1..56: note = Description of Artificial Sequence: Syntheticoligonucleotide
  source 1..56: mol_type = other DNA
ctttcaagactaatagattgctccttacgaggagacattctgcgttcgagaagctg

SEQ ID NO: 1348 - DNA, 56 bp, synthetic construct
  misc_feature 1..56: note = Description of Artificial Sequence: Syntheticoligonucleotide
  source 1..56: mol_type = other DNA
ctttcaagactaatagattgctccttacgaggagaccattctgcgttcgagaagct

SEQ ID NO: 1349 - DNA, 56 bp, synthetic construct
  misc_feature 1..56: note = Description of Artificial Sequence: Syntheticoligonucleotide
  source 1..56: mol_type = other DNA
ctttcaagactaatagattgctccttacgaggagactcgaacgcagaatgaaagtg

SEQ ID NO: 1350 - DNA, 56 bp, synthetic construct; identical to SEQ ID NO: 1329
  misc_feature 1..56: note = Description of Artificial Sequence: Syntheticoligonucleotide
  source 1..56: mol_type = other DNA

SEQ ID NO: 1351 - DNA, 56 bp, synthetic construct
  misc_feature 1..56: note = Description of Artificial Sequence: Syntheticoligonucleotide
  source 1..56: mol_type = other DNA
ctttcaagactaatagattgctccttacgaggagactatccactttcattctgcgt

SEQ ID NO: 1352 - DNA, 56 bp, synthetic construct
  misc_feature 1..56: note = Description of Artificial Sequence: Syntheticoligonucleotide
  source 1..56: mol_type = other DNA
ctttcaagactaatagattgctccttacgaggagacttatccactttcattctgcg

SEQ ID NO: 1353 - DNA, 56 bp, synthetic construct
  misc_feature 1..56: note = Description of Artificial Sequence: Syntheticoligonucleotide
  source 1..56: mol_type = other DNA
ctttcaagactaatagattgctccttacgaggagactttatccactttcattctgc

SEQ ID NO: 1354 - DNA, 56 bp, synthetic construct
  misc_feature 1..56: note = Description of Artificial Sequence: Syntheticoligonucleotide
  source 1..56: mol_type = other DNA
ctttcaagactaatagattgctccttacgaggagacttttatccactttcattctg

SEQ ID NO: 1355 - DNA, 56 bp, synthetic construct
  misc_feature 1..56: note = Description of Artificial Sequence: Syntheticoligonucleotide
  source 1..56: mol_type = other DNA
ctttcaagactaatagattgctccttacgaggagacaacaaagaagggtcatcagt

SEQ ID NO: 1356 - DNA, 56 bp, synthetic construct
  misc_feature 1..56: note = Description of Artificial Sequence: Syntheticoligonucleotide
  source 1..56: mol_type = other DNA
ctttcaagactaatagattgctccttacgaggagaccctcctttaacaaagaaggg

SEQ ID NO: 1357 - DNA, 56 bp, synthetic construct
  misc_feature 1..56: note = Description of Artificial Sequence: Syntheticoligonucleotide
  source 1..56: mol_type = other DNA
ctttcaagactaatagattgctccttacgaggagacgcctcctttaacaaagaagg

SEQ ID NO: 1358 - DNA, 56 bp, synthetic construct; identical to SEQ ID NO: 1330
  misc_feature 1..56: note = Description of Artificial Sequence: Syntheticoligonucleotide
  source 1..56: mol_type = other DNA

SEQ ID NO: 1359 - DNA, 56 bp, synthetic construct
  misc_feature 1..56: note = Description of Artificial Sequence: Syntheticoligonucleotide
  source 1..56: mol_type = other DNA
ctttcaagactaatagattgctccttacgaggagacgttaaaggaggcaaagacaa

SEQ ID NO: 1360 - DNA, 56 bp, synthetic construct
  misc_feature 1..56: note = Description of Artificial Sequence: Syntheticoligonucleotide
  source 1..56: mol_type = other DNA
ctttcaagactaatagattgctccttacgaggagacttaaaggaggcaaagacaaa

SEQ ID NO: 1361 - DNA, 56 bp, synthetic construct
  misc_feature 1..56: note = Description of Artificial Sequence: Syntheticoligonucleotide
  source 1..56: mol_type = other DNA
ctttcaagactaatagattgctccttacgaggagactctttgcctcctttaacaaa

SEQ ID NO: 1362 - DNA, 56 bp, synthetic construct
  misc_feature 1..56: note = Description of Artificial Sequence: Syntheticoligonucleotide
  source 1..56: mol_type = other DNA
ctttcaagactaatagattgctccttacgaggagacgtctttgcctcctttaacaa

SEQ ID NO: 1363 - DNA, 56 bp, synthetic construct
  misc_feature 1..56: note = Description of Artificial Sequence: Syntheticoligonucleotide
  source 1..56: mol_type = other DNA
ctttcaagactaatagattgctccttacgaggagacgtctaacttactttgtcttt

SEQ ID NO: 1364 - DNA, 56 bp, synthetic construct
  misc_feature 1..56: note = Description of Artificial Sequence: Syntheticoligonucleotide
  source 1..56: mol_type = other DNA
ctttcaagactaatagattgctccttacgaggagacttggtctaacttactttgtc

SEQ ID NO: 1365 - DNA, 57 bp, synthetic construct
  misc_feature 1..57: note = Description of Artificial Sequence: Syntheticoligonucleotide
  source 1..57: mol_type = other DNA
gctggggaccgatcctgattgctcgctgcggcgagacccactttgtcagtgcgtctg

SEQ ID NO: 1366 - DNA, 57 bp, synthetic construct
  misc_feature 1..57: note = Description of Artificial Sequence: Syntheticoligonucleotide
  source 1..57: mol_type = other DNA
gctggggaccgatcctgattgctcgctgcggcgagacctcaatgggatggaaggctg

SEQ ID NO: 1367 - DNA, 57 bp, synthetic construct
  misc_feature 1..57: note = Description of Artificial Sequence: Syntheticoligonucleotide
  source 1..57: mol_type = other DNA
gctggggaccgatcctgattgctcgctgcggcgagacaggaatacatggtacacgtt

SEQ ID NO: 1368 - DNA, 57 bp, synthetic construct
  misc_feature 1..57: note = Description of Artificial Sequence: Syntheticoligonucleotide
  source 1..57: mol_type = other DNA
gctggggaccgatcctgattgctcgctgcggcgagacaagaacattttcagcttctc

SEQ ID NO: 1369 - DNA, 57 bp, synthetic construct
  misc_feature 1..57: note = Description of Artificial Sequence: Syntheticoligonucleotide
  source 1..57: mol_type = other DNA
gctggggaccgatcctgattgctcgctgcggcgagacatccactttcattctgcgtt

SEQ ID NO: 1370 - DNA, 57 bp, synthetic construct
  misc_feature 1..57: note = Description of Artificial Sequence: Syntheticoligonucleotide
  source 1..57: mol_type = other DNA
gctggggaccgatcctgattgctcgctgcggcgagactttgttaaaggaggcaaaga

SEQ ID NO: 1371 - DNA, 57 bp, synthetic construct
  misc_feature 1..57: note = Description of Artificial Sequence: Syntheticoligonucleotide
  source 1..57: mol_type = other DNA
gctggggaccgatcctgattgctcgctgcggcgagactccccagagtccatgtcaga

SEQ ID NO: 1372 - DNA, 57 bp, synthetic construct
  misc_feature 1..57: note = Description of Artificial Sequence: Syntheticoligonucleotide
  source 1..57: mol_type = other DNA
gctggggaccgatcctgattgctcgctgcggcgagactcagtgcgtctgacatggac

SEQ ID NO: 1373 - DNA, 57 bp, synthetic construct
  misc_feature 1..57: note = Description of Artificial Sequence: Syntheticoligonucleotide
  source 1..57: mol_type = other DNA
gctggggaccgatcctgattgctcgctgcggcgagacgtcagtgcgtctgacatgga

SEQ ID NO: 1374 - DNA, 57 bp, synthetic construct; identical to SEQ ID NO: 1365
  misc_feature 1..57: note = Description of Artificial Sequence: Syntheticoligonucleotide
  source 1..57: mol_type = other DNA

SEQ ID NO: 1375 - DNA, 57 bp, synthetic construct
  misc_feature 1..57: note = Description of Artificial Sequence: Syntheticoligonucleotide
  source 1..57: mol_type = other DNA
gctggggaccgatcctgattgctcgctgcggcgagactgttcccactttgtcagtgc

SEQ ID NO: 1376 - DNA, 57 bp, synthetic construct; identical to SEQ ID NO: 1366
  misc_feature 1..57: note = Description of Artificial Sequence: Syntheticoligonucleotide
  source 1..57: mol_type = other DNA

SEQ ID NO: 1377 - DNA, 57 bp, synthetic construct
  misc_feature 1..57: note = Description of Artificial Sequence: Syntheticoligonucleotide
  source 1..57: mol_type = other DNA
gctggggaccgatcctgattgctcgctgcggcgagaccatcccattgaggaatacat

SEQ ID NO: 1378 - DNA, 57 bp, synthetic construct; identical to SEQ ID NO: 1367
  misc_feature 1..57: note = Description of Artificial Sequence: Syntheticoligonucleotide
  source 1..57: mol_type = other DNA

SEQ ID NO: 1379 - DNA, 57 bp, synthetic construct
  misc_feature 1..57: note = Description of Artificial Sequence: Syntheticoligonucleotide
  source 1..57: mol_type = other DNA
gctggggaccgatcctgattgctcgctgcggcgagacaacgtgtaccatgtattcct

SEQ ID NO: 1380 - DNA, 57 bp, synthetic construct
  misc_feature 1..57: note = Description of Artificial Sequence: Syntheticoligonucleotide
  source 1..57: mol_type = other DNA
gctggggaccgatcctgattgctcgctgcggcgagacttcaacgtgtaccatgtatt

SEQ ID NO: 1381 - DNA, 57 bp, synthetic construct; identical to SEQ ID NO: 1368
  misc_feature 1..57: note = Description of Artificial Sequence: Syntheticoligonucleotide
  source 1..57: mol_type = other DNA

SEQ ID NO: 1382 - DNA, 57 bp, synthetic construct
  misc_feature 1..57: note = Description of Artificial Sequence: Syntheticoligonucleotide
  source 1..57: mol_type = other DNA
gctggggaccgatcctgattgctcgctgcggcgagacgagaagctgaaaatgttctt

SEQ ID NO: 1383 - DNA, 57 bp, synthetic construct
  misc_feature 1..57: note = Description of Artificial Sequence: Syntheticoligonucleotide
  source 1..57: mol_type = other DNA
gctggggaccgatcctgattgctcgctgcggcgagactcagcttctcgaacgcagaa

SEQ ID NO: 1384 - DNA, 57 bp, synthetic construct
  misc_feature 1..57: note = Description of Artificial Sequence: Syntheticoligonucleotide
  source 1..57: mol_type = other DNA
gctggggaccgatcctgattgctcgctgcggcgagaccagcttctcgaacgcagaat

SEQ ID NO: 1385 - DNA, 57 bp, synthetic construct
  misc_feature 1..57: note = Description of Artificial Sequence: Syntheticoligonucleotide
  source 1..57: mol_type = other DNA
gctggggaccgatcctgattgctcgctgcggcgagactgcgttcgagaagctgaaaa

SEQ ID NO: 1386 - DNA, 57 bp, synthetic construct
  misc_feature 1..57: note = Description of Artificial Sequence: Syntheticoligonucleotide
  source 1..57: mol_type = other DNA
gctggggaccgatcctgattgctcgctgcggcgagacagcttctcgaacgcagaatg

SEQ ID NO: 1387 - DNA, 57 bp, synthetic construct
  misc_feature 1..57: note = Description of Artificial Sequence: Syntheticoligonucleotide
  source 1..57: mol_type = other DNA
gctggggaccgatcctgattgctcgctgcggcgagacattctgcgttcgagaagctg

SEQ ID NO: 1388 - DNA, 57 bp, synthetic construct
  misc_feature 1..57: note = Description of Artificial Sequence: Syntheticoligonucleotide
  source 1..57: mol_type = other DNA
gctggggaccgatcctgattgctcgctgcggcgagaccattctgcgttcgagaagct

SEQ ID NO: 1389 - DNA, 57 bp, synthetic construct
  misc_feature 1..57: note = Description of Artificial Sequence: Syntheticoligonucleotide
  source 1..57: mol_type = other DNA
gctggggaccgatcctgattgctcgctgcggcgagactcgaacgcagaatgaaagtg

SEQ ID NO: 1390 - DNA, 57 bp, synthetic construct; identical to SEQ ID NO: 1369
  misc_feature 1..57: note = Description of Artificial Sequence: Syntheticoligonucleotide
  source 1..57: mol_type = other DNA

SEQ ID NO: 1391 - DNA, 57 bp, synthetic construct
  misc_feature 1..57: note = Description of Artificial Sequence: Syntheticoligonucleotide
  source 1..57: mol_type = other DNA
gctggggaccgatcctgattgctcgctgcggcgagactatccactttcattctgcgt

SEQ ID NO: 1392 - DNA, 57 bp, synthetic construct
  misc_feature 1..57: note = Description of Artificial Sequence: Syntheticoligonucleotide
  source 1..57: mol_type = other DNA
gctggggaccgatcctgattgctcgctgcggcgagacttatccactttcattctgcg

SEQ ID NO: 1393 - DNA, 57 bp, synthetic construct
  misc_feature 1..57: note = Description of Artificial Sequence: Syntheticoligonucleotide
  source 1..57: mol_type = other DNA
gctggggaccgatcctgattgctcgctgcggcgagactttatccactttcattctgc

SEQ ID NO: 1394 - DNA, 57 bp, synthetic construct
  misc_feature 1..57: note = Description of Artificial Sequence: Syntheticoligonucleotide
  source 1..57: mol_type = other DNA
gctggggaccgatcctgattgctcgctgcggcgagacttttatccactttcattctg

SEQ ID NO: 1395 - DNA, 57 bp, synthetic construct
  misc_feature 1..57: note = Description of Artificial Sequence: Syntheticoligonucleotide
  source 1..57: mol_type = other DNA
gctggggaccgatcctgattgctcgctgcggcgagacaacaaagaagggtcatcagt

SEQ ID NO: 1396 - DNA, 57 bp, synthetic construct
  misc_feature 1..57: note = Description of Artificial Sequence: Syntheticoligonucleotide
  source 1..57: mol_type = other DNA
gctggggaccgatcctgattgctcgctgcggcgagaccctcctttaacaaagaaggg

SEQ ID NO: 1397 - DNA, 57 bp, synthetic construct
  misc_feature 1..57: note = Description of Artificial Sequence: Syntheticoligonucleotide
  source 1..57: mol_type = other DNA
gctggggaccgatcctgattgctcgctgcggcgagacgcctcctttaacaaagaagg

SEQ ID NO: 1398 - DNA, 57 bp, synthetic construct; identical to SEQ ID NO: 1370
  misc_feature 1..57: note = Description of Artificial Sequence: Syntheticoligonucleotide
  source 1..57: mol_type = other DNA

SEQ ID NO: 1399 - DNA, 57 bp, synthetic construct
  misc_feature 1..57: note = Description of Artificial Sequence: Syntheticoligonucleotide
  source 1..57: mol_type = other DNA
gctggggaccgatcctgattgctcgctgcggcgagacgttaaaggaggcaaagacaa

SEQ ID NO: 1400 - DNA, 57 bp, synthetic construct
  misc_feature 1..57: note = Description of Artificial Sequence: Syntheticoligonucleotide
  source 1..57: mol_type = other DNA
gctggggaccgatcctgattgctcgctgcggcgagacttaaaggaggcaaagacaaa

SEQ ID NO: 1401 - DNA, 57 bp, synthetic construct
  misc_feature 1..57: note = Description of Artificial Sequence: Syntheticoligonucleotide
  source 1..57: mol_type = other DNA
gctggggaccgatcctgattgctcgctgcggcgagactctttgcctcctttaacaaa

SEQ ID NO: 1402 - DNA, 57 bp, synthetic construct
  misc_feature 1..57: note = Description of Artificial Sequence: Syntheticoligonucleotide
  source 1..57: mol_type = other DNA
gctggggaccgatcctgattgctcgctgcggcgagacgtctttgcctcctttaacaa

SEQ ID NO: 1403 - DNA, 57 bp, synthetic construct
  misc_feature 1..57: note = Description of Artificial Sequence: Syntheticoligonucleotide
  source 1..57: mol_type = other DNA
gctggggaccgatcctgattgctcgctgcggcgagacgtctaacttactttgtcttt

SEQ ID NO: 1404 - DNA, 57 bp, synthetic construct
  misc_feature 1..57: note = Description of Artificial Sequence: Syntheticoligonucleotide
  source 1..57: mol_type = other DNA
gctggggaccgatcctgattgctcgctgcggcgagacttggtctaacttactttgtc

SEQ ID NO: 1405 - DNA, 2271 bp, unidentified
  misc_feature 1..2271: note = Description of Unknown:CasPhi sequence
  source 1..2271: mol_type = other DNA
atgcctaagcctgccgtggaaagcgagttcagcaaggtgctgaagaagcacttccccggcgagcggttcagatccagctacatgaagagaggcggcaagatcctggccgctcaaggcgaagaagccgtggtcgcatatctgcagggcaagagcgaggaagaacctcctaacttccagcctcctgccaagtgccacgtggtcaccaagagcagagatttcgccgagtggcccatcatgaaggcctctgaagccatccagcggtacatctacgccctgagcacaacagaaagagccgcctgcaagcctggcaagagcagcgaatctcacgccgcttggtttgccgctaccggcgtgtccaatcacggctactctcatgtgcagggcctgaacctgatcttcgatcacaccctgggcagatacgacggcgtgctgaaaaaggtgcagctgcggaacgagaaggccagagccagactggaatccatcaacgccagcagagccgatgagggcctgcctgagattaaggccgaagaggaagaggtggccacaaacgaaaccggccatctgctgcagccacctggcatcaaccctagcttctacgtgtaccagacaatcagccctcaggcctacagacccagggacgagattgtgctgcctcctgagtatgccggctacgtgcgggatcccaacgctcctattcctctgggcgtcgtgcggaacagatgcgacatccagaaaggctgccccggctacattcccgagtggcagagagaagccggcaccgccatttctccaaagacaggcaaagccgtgaccgtgcctggcctgtctcctaagaaaaacaagcggatgcggcggtactggcggagcgagaaagaaaaagcccaggacgccctgctggtcacagtgcggattggcacagattgggtcgtgatcgatgtgcgcggcctgctgagaaatgccagatggcggacaatcgcccctaaggacatcagcctgaacgcactgctggacctgttcaccggcgatcctgtgattgacgtgcggcggaacatcgtgaccttcacctacacactggacgcctgcggcacctacgccagaaagtggacactgaagggcaagcagaccaaggccactctggacaagctgaccgccacacagacagtggccctggtggctattgatctgggccagacaaaccctatcagcgccggcatcagcagagtgacccaagaaaatggcgccctgcagtgcgagcccctggacagattcacactgcccgacgacctgctgaaggacatctccgcctatagaatcgcctgggaccgcaatgaagaggaactgagagccagaagcgtggaagccctgcctgaagcacagcaggctgaagtgcgagcactggacggggtgtccaaagagacagccagaactcagctgtgcgccgactttggactggaccccaaaagactgccctgggacaagatgagcagcaacaccaccttcatcagcgaggccctgctgagcaatagcgtgtccagagatcaggtgttcttcacccctgctccaaagaagggcgccaagaagaaagcccctgtcgaagtgatgcggaaggaccggacatgggccagagcttacaagcccagactgtccgtggaagctcagaagctgaagaacgaagccctgtgggccctgaagagaacaagccccgagtacctgaagctgagccggcggaaagaagaactctgccggcggagcatcaactacgtgatcgagaaaacccggcggagaacccagtgccagatcgtgattcctgtgatcgaggacctgaacgtgcggttctttcacggcagcggcaagagactgcccggctgggataatttcttcaccgccaaaaaagaaaaccggtggttcatccagggcctgcacaaggccttcagcgacctgagaacccaccggtccttttacgtgttcgaagtgcggcccgagcggaccagcatcacctgtcctaaatgcggccactgcgaagtgggcaacagagatggcgaggccttccagtgtctgagctgtggcaagacctgcaacgccgacctggatgtggccactcacaatctgacacaggtggccctgaccggcaagaccatgcctaagagagaggaacctagggacgcccagggtacagcccctgccagaaagacaaagaaagccagcaagagcaaggcccctcctgccgagagagaagatcagaccccagctcaagagcccagccagacatct

SEQ ID NO: 1406 - DNA, 2298 bp, unidentified
  misc_feature 1..2298: note = Description of Unknown:CasPhi sequence
  source 1..2298: mol_type = other DNA
atggaaaaagagatcaccgagctgaccaagatccgcagagagttccccaacaagaagttcagcagcaccgacatgaagaaggccggcaagctgctgaaggccgaaggacctgatgccgtgcgggacttcctgaacagctgccaagagatcatcggcgacttcaagcctccagtcaagaccaacatcgtgtccatcagcagacccttcgaggaatggcccgtgtccatggttggacgggccatccaagagtactacttcagcctgaccaaagaggaactggaaagcgttcaccccggcaccagcagcgaggaccacaagagctttttcaacatcaccggcctgagcaactacaactacaccagcgtgcagggcctgaacctgatcttcaagaacgccaaggccatctacgacggcaccctggtcaaggccaacaacaagaacaagaagctcgagaagaagtttaacgagatcaaccacaagcggagcctggaaggcctgcctatcatcacccctgatttcgaggaacccttcgacgagaacggccacctgaacaaccctccaggcatcaaccggaacatctacggctatcagggctgcgccgccaaggtgttcgtgccttctaagcacaagatggtgtccctgcctaaagagtacgagggctacaacagggaccccaacctgtctctggccggcttcagaaacagactggaaatccctgagggcgagcctggccatgtgccatggttccagagaatggatatccccgagggccagatcggacacgtgaacaagatccagcggttcaacttcgtgcacggcaagaacagcggcaaagtgaagttctccgacaagaccggcagagtgaagagataccaccacagcaagtacaaggacgctaccaagccttacaagttcctggaagagtccaagaaggtgtcagccctggacagcatcctggccatcatcacaatcggcgacgactgggtcgtgttcgacatcagaggcctgtaccggaacgtgttctacagagagctggcccagaaaggcctgacagctgtgcaactgctggacctgtttaccggcgatcccgtgatcgaccccaagaaaggcgtggtcaccttcagctacaaagagggcgtcgtccccgtctttagccagaaaatcgtgccccggttcaagagccgggacaccctggaaaagctgacctctcagggacctgtggctctgctgtctgtggacctgggacagaatgaacctgtggccgccagagtgtgcagcctgaagaacatcaacgacaagatcaccctggacaactcttgccggatcagcttcctggacgactacaagaagcagatcaaggactacagagacagcctggacgagctggaaatcaagatccggctggaagccatcaactccctcgagacaaaccagcaggtcgagatcagagatctggacgtgttcagcgccgaccgggccaaagccaataccgtggacatgtttgacatcgaccctaacctgatcagctgggactccatgagcgacgccagagtcagcacccagatcagcgacctgtacctgaagaatggcggcgacgagagccgggtgtactttgagattaacaacaaacggattaagcggagcgactacaacatcagccagctcgtgcggcccaagctgagcgatagcaccagaaagaacctgaacgacagcatctggaagctgaagcggaccagcgaggaatacctgaagctgagcaagcggaagctggaactgagcagagccgtcgtgaattacaccatccggcagagcaaactgctgagcggcatcaatgacatcgtgatcattctcgaggacctggacgtgaagaagaaattcaacggcagaggcatccgcgatatcggctgggacaacttcttcagctcccggaaagaaaaccggtggttcatccccgccttccacaaggcctttagcgagctgagcagcaacaggggcctgtgcgtgatcgaagtgaatcctgcctggaccagcgccacctgtcctgattgtggcttctgcagcaaagaaaacagagatggcatcaacttcacgtgccggaagtgcggcgtgtcctaccacgccgatattgacgtggccacactgaatattgccagagtggccgtgctgggcaagcctatgtctggacctgccgacagagagagactgggcgacaccaagaaacctagagtggcccgcagcagaaagaccatgaagcggaaggacatcagcaacagcaccgtcgaggccatggttacagct

SEQ ID NO: 1407 - DNA, 2316 bp, unidentified
  misc_feature 1..2316: note = Description of Unknown:CasPhi sequence
  source 1..2316: mol_type = other DNA
atgagcaacaccgccgtgtccaccagagaacacatgtccaacaagacaacccctccatctcctctgagcctgctgctgagagcccactttcctggcctgaagttcgagagccaggactacaagatcgccggcaagaaactgagagatggcggacctgaggccgtgatcagctacctgactggaaaaggccaggccaagctgaaggacgtgaagcctcctgccaaggcctttgtgatcgcccagagcagacccttcatcgagtgggacctcgtcagagtgtcccggcagatccaagagaagatctttggcatccccgccaccaagggcagacctaagcaagatggcctgagcgagacagccttcaacgaagccgtggccagcctggaagtggacggcaagagcaagctgaacgaggaaaccagagccgccttctacgaggtgctgggacttgatgccccaagcctgcatgctcaggcccagaatgccctgatcaagagcgccatcagcatcagagaaggcgtgctgaagaaggtggaaaaccggaacgagaagaacctgagcaagaccaagcggcggaaagaggctggcgaagaggccacctttgtggaagagaaggcccacgacgagcggggctatctgattcatcctcctggcgtgaaccagacaatccccggctatcaggccgtggtcatcaagagctgccccagcgatttcatcggcctgcctagtggctgtctggccaaagagtctgccgaggctctgaccgattacctgcctcacgaccggatgactatccccaagggacagcctggctatgtgcccgaatggcagcaccctctgctgaacagaagaaagaaccggcgcagaagagactggtacagcgccagcctgaacaagcccaaggccacctgtagcaagagatccggcacacccaaccggaagaacagcagaaccgaccagatccagagcggcagattcaagggcgccattcctgtgctgatgcggttccaggatgagtgggtcatcatcgacatccggggcctgctgagaaacgcccggtatcggaagctgctgaaagagaagtccaccattcctgacctgctgagcctgttcaccggcgatcccagcatcgatatgagacagggcgtgtgcaccttcatctacaaggccggccaggcctgtagcgccaagatggtcaagacaaagaacgcccctgagatcctgtccgagctgaccaagtctggacctgtggtgctggtgtccatcgacctgggccagacaaatcctatcgccgccaaggtgtccagagtgacccagctgtctgatggccagctgagccacgagacactgctgagggaactgctgagcaacgatagcagcgacggcaaagagatcgcccggtacagagtggccagcgacagactgagagacaagctggccaatctggccgtggaaagactgagccctgagcacaagagcgagatcctgagagccaagaacgacacccctgctctgtgcaaggccagagtgtgtgctgccctgggactgaaccctgaaatgatcgcctgggacaagatgaccccttacaccgagtttctggccaccgcctacctggaaaaaggcggcgacagaaaagtggccacactgaagcccaagaacagacccgagatgctgcggcgggacatcaagttcaagggaaccgagggcgtcagaatcgaggtgtcacctgaagccgccgaggcctatagagaagcccagtgggatctgcagaggacaagccccgagtacctgagactgtccacctggaagcaagagctgacaaagagaatcctgaaccagctgcggcacaaggccgccaaaagcagccagtgtgaagtggtggtcatggccttcgaggacctgaacatcaagatgatgcacggcaacggcaagtgggccgatggtggatgggatgccttcttcatcaagaaacgcgagaaccggtggttcatgcaggccttccacaagagcctgacagagctgggagcacacaagggcgtgccaaccatcgaagtgacccctcacagaaccagcatcacctgtaccaagtgcggccactgcgacaaggccaacagagatggggagagattcgcctgccagaaatgcggctttgtggcccacgccgatctggaaatcgccaccgacaacatcgagagagtggccctgacaggcaagcccatgcctaagcctgagagcgagagaagcggcgacgccaagaaatctgtgggagccagaaaggccgccttcaagcctgaggaagatgccgaagctgccgag

SEQ ID NO: 1408 - DNA, 2151 bp, unidentified
  misc_feature 1..2151: note = Description of Unknown:CasPhi sequence
  source 1..2151: mol_type = other DNA
atgatcaagcctaccgtcagccagtttctgacccctggcttcaagctgatccggaaccactctagaacagccggcctgaagctgaagaacgagggcgaagaggcctgcaagaaattcgtgcgcgagaacgagatccccaaggacgagtgccccaactttcaaggcggacccgccattgccaacatcattgccaagagccgcgagttcaccgagtgggagatctaccagtctagcctggccatccaagaagtgatcttcaccctgcctaaggacaagctgcccgagcctatcctgaaagaggaatggcgagcccagtggctgtctgagcacggactggataccgtgccttacaaagaagccgccggactgaacctgatcatcaagaacgccgtgaacacctacaagggcgtgcaagtgaaggtggacaacaagaacaaaaacaacctggccaagatcaaccggaagaatgagatcgccaagctgaacggcgagcaagagatcagcttcgaggaaatcaaggccttcgacgacaagggctacctgctgcagaagccctctccaaacaagagcatctactgctaccagagcgtgtcccctaagcctttcatcaccagcaagtaccacaacgtgaacctgcctgaagagtacatcggctactaccggaagtccaacgagcccatcgtgtccccataccagttcgacagactgcggatccctatcggcgagcctggctatgtgcctaagtggcagtacaccttcctgagcaagaaagagaacaagcggcggaagctgagcaagcggatcaagaatgtgtccccaatcctgggcatcatctgcatcaagaaagattggtgcgtgttcgacatgcggggcctgctgagaacaaaccactggaagaagtatcacaagcccaccgacagcatcaacgacctgttcgactacttcaccggcgatcccgtgatcgacaccaaggccaatgtcgtgcggttccggtacaagatggaaaacggcatcgtgaactacaagcccgtgcgggaaaagaagggcaaagagctgctggaaaacatctgcgaccagaacggcagctgcaagctggccacagtggatgtgggccagaacaaccctgtggccatcggcctgttcgagctgaaaaaagtgaacggggagctgaccaagacactgatcagcagacaccccacacctatcgatttctgcaacaagatcaccgcctaccgcgagagatacgacaagctggaaagcagcatcaagctggacgccatcaagcagctgaccagcgagcagaaaatcgaagtggacaactacaacaacaacttcacgccccagaacaccaagcagatcgtgtgcagcaagctgaatatcaaccccaacgatctgccctgggacaagatgatcagcggcacccacttcatcagcgagaaggcccaggtgtccaacaagagcgagatctactttaccagcaccgataagggcaagaccaaggacgtgatgaagtccgactacaagtggttccaggactataagcccaagctgtccaaagaagtgcgggacgccctgagcgatattgagtggcggctgagaagagagagcctggaattcaacaagctcagcaagagcagagagcaggacgccagacagctggccaattggatcagcagcatgtgcgacgtgatcggcatcgagaacctggtcaagaagaacaacttcttcggcggcagcggcaagagagaacccggctgggacaacttctacaagccgaagaaagaaaaccggtggtggatcaacgccatccacaaggccctgacagagctgtcccagaacaagggaaagagagtgatcctgctgcctgccatgcggaccagcatcacctgtcctaagtgcaagtactgcgacagcaagaaccgcaacggcgagaagttcaattgcctgaagtgtggcattgagctgaacgccgacatcgacgtggccaccgaaaatctggctaccgtggccatcacagcccagagcatgcctaagccaacctgcgagagaagcggcgacgccaagaaacctgtgcgggccagaaaagccaaggctcccgagttccacgataagctggcccctagctacaccgtggtgctgagagaagctgtg

SEQ ID NO: 1409 - DNA, 2298 bp, unidentified
  misc_feature 1..2298: note = Description of Unknown:CasPhi sequence
  source 1..2298: mol_type = other DNA
atgtacagcctggaaatggccgacctgaagtccgagccttctctgctggctaagctgctgagagacagattccccggcaagtactggctgcctaagtactggaagctggccgagaagaagagactgacaggcggagaagaagccgcctgcgagtacatggctgacaagcagctggatagccctccacctaacttccggcctccagccagatgtgtgatcctggccaagagcagacccttcgaggattggccagtgcacagagtggccagcaaggcccagtcttttgtgatcggcctgagcgagcagggcttcgctgctcttagagctgcccctcctagcacagccgacgccagaagagattggctgagaagccatggcgccagcgaggatgatctgatggctctggaagcccagctgctggaaaccatcatgggcaacgccatttctctgcacggcggcgtgctgaagaagatcgacaacgccaacgtgaaggccgccaagagactgtccggaagaaacgaggccagactgaacaagggcctgcaagagctgcctcctgagcaagagggatctgcctatggcgccgatggcctgctggttaatcctcctggcctgaacctgaacatctactgcagaaagagctgctgccccaagcctgtgaagaacaccgccagattcgtgggacactaccccggctacctgagagactccgacagcatcctgatcagcggcaccatggaccggctgacaatcatcgagggaatgcccggacacatccccgcctggcaacgagaacagggacttgtgaaacctggcggcagaaggcggagactgtctggcagcgagagcaacatgagacagaaggtggaccccagcacaggccccagaagaagcacaagatccggcaccgtgaacagaagcaaccagcggacaggcagaaacggcgatcctctgctggtggaaatccggatgaaggaagattgggtcctgctggacgccagaggcctgctgagaaatctgagatggcgcgagtccaagagaggcctgagctgcgatcacgaggatctgagcctgtctggactgctggccctgttttctggcgaccccgtgatcgatcctgtgcggaatgaggtggtgttcctgtacggcgagggcatcattccagtgcggagcacaaagcctgtgggcaccagacagagcaagaaactgctggaacggcaggccagcatgggccctctgacactgatctcttgtgacctgggccagaccaacctgattgccggcagagcctctgctatcagcctgacacatggatctctgggcgtcagatccagcgtgcggattgagctggaccccgagatcatcaagagcttcgagcggctgagaaaggacgccgacagactggaaaccgagatcctgaccgccgccaaagaaaccctgagcgacgaacagaggggcgaagtgaacagccacgagaaggatagcccacagacagccaaggccagcctgtgtagagagctgggactgcaccctccatctctgccttggggacagatgggccctagcaccacctttatcgccgacatgctgatctcccacggcagggacgatgatgcctttctgagccacggcgagttccccacactggaaaagcggaagaagttcgataagcggttctgcctggaaagcagacccctgctgagcagcgagacaagaaaggccctgaacgagtccctgtgggaagtgaagagaaccagcagcgagtacgcccggctgagccagagaaagaaagagatggctagacgggccgtgaacttcgtggtcgagatctccagaagaaagaccggcctgtccaacgtgatcgtgaacatcgaggacctgaacgtgcggatctttcacggcggaggaaaacaggctcctggctgggatggcttcttcagacccaagtccgagaaccggtggttcatccaggccatccacaaggccttcagcgatctggccgctcaccacggaatccctgtgatcgagagcgaccctcagcggaccagcatgacctgtcctgagtgtggccactgcgacagcaagaaccggaatggcgttcggttcctgtgcaaaggctgtggcgcctccatggacgccgattttgatgccgcctgccggaacctggaaagagtggctctgacaggcaagcccatgcctaagcctagcacctcctgtgaaagactgctgagcgccaccaccggcaaagtgtgctctgatcactccctgtctcacgacgccatcgagaaggcttcttaa

SEQ ID NO: 1410 - DNA, 2301 bp, unidentified
  misc_feature 1..2301: note = Description of Unknown:CasPhi sequence
  source 1..2301: mol_type = other DNA
atggaaaaagagatcaccgagctgaccaagatccgcagagagttccccaacaagaagttcagcagcaccgacatgaagaaggccggcaagctgctgaaggccgaaggacctgatgccgtgcgggacttcctgaacagctgccaagagatcatcggcgacttcaagcctccagtcaagaccaacatcgtgtccatcagcagacccttcgaggaatggcccgtgtccatggttggacgggccatccaagagtactacttcagcctgaccaaagaggaactggaaagcgttcaccccggcaccagcagcgaggaccacaagagctttttcaacatcaccggcctgagcaactacaactacaccagcgtgcagggcctgaacctgatcttcaagaacgccaaggccatctacgacggcaccctggtcaaggccaacaacaagaacaagaagctcgagaagaagtttaacgagatcaaccacaagcggagcctggaaggcctgcctatcatcacccctgatttcgaggaacccttcgacgagaacggccacctgaacaaccctccaggcatcaaccggaacatctacggctatcagggctgcgccgccaaggtgttcgtgccttctaagcacaagatggtgtccctgcctaaagagtacgagggctacaacagggaccccaacctgtctctggccggcttcagaaacagactggaaatccctgagggcgagcctggccatgtgccatggttccagagaatggatatccccgagggccagatcggacacgtgaacaagatccagcggttcaacttcgtgcacggcaagaacagcggcaaagtgaagttctccgacaagaccggcagagtgaagagataccaccacagcaagtacaaggacgctaccaagccttacaagttcctggaagagtccaagaaggtgtcagccctggacagcatcctggccatcatcacaatcggcgacgactgggtcgtgttcgacatcagaggcctgtaccggaacgtgttctacagagagctggcccagaaaggcctgacagctgtgcaactgctggacctgtttaccggcgatcccgtgatcgaccccaagaaaggcgtggtcaccttcagctacaaagagggcgtcgtccccgtctttagccagaaaatcgtgccccggttcaagagccgggacaccctggaaaagctgacctctcagggacctgtggctctgctgtctgtggacctgggacagaatgaacctgtggccgccagagtgtgcagcctgaagaacatcaacgacaagatcaccctggacaactcttgccggatcagcttcctggacgactacaagaagcagatcaaggactacagagacagcctggacgagctggaaatcaagatccggctggaagccatcaactccctcgagacaaaccagcaggtcgagatcagagatctggacgtgttcagcgccgaccgggccaaagccaataccgtggacatgtttgacatcgaccctaacctgatcagctgggactccatgagcgacgccagagtcagcacccagatcagcgacctgtacctgaagaatggcggcgacgagagccgggtgtactttgagattaacaacaaacggattaagcggagcgactacaacatcagccagctcgtgcggcccaagctgagcgatagcaccagaaagaacctgaacgacagcatctggaagctgaagcggaccagcgaggaatacctgaagctgagcaagcggaagctggaactgagcagagccgtcgtgaattacaccatccggcagagcaaactgctgagcggcatcaatgacatcgtgatcattctcgaggacctggacgtgaagaagaaattcaacggcagaggcatccgcgatatcggctgggacaacttcttcagctcccggaaagaaaaccggtggttcatccccgccttccacaagacctttagcgagctgagcagcaacaggggcctgtgcgtgatcgaagtgaatcctgcctggaccagcgccacctgtcctgattgtggcttctgcagcaaagaaaacagagatggcatcaacttcacgtgccggaagtgcggcgtgtcctaccacgccgatattgacgtggccacactgaatattgccagagtggccgtgctgggcaagcctatgtctggacctgccgacagagagagactgggcgacaccaagaaacctagagtggcccgcagcagaaagaccatgaagcggaaggacatcagcaacagcaccgtcgaggccatggttacagcttaa

SEQ ID NO: 1411 - DNA, 30 bp, synthetic construct; identical to SEQ ID NO: 108
  misc_feature 1..30: note = Description of Artificial Sequence: Syntheticoligonucleotide
  source 1..30: mol_type = other DNA

SEQ ID NO: 1412 - DNA, 2195 bp, synthetic construct
  misc_feature 1..2195: note = Description of Artificial Sequence: Syntheticpolynucleotide
  source 1..2195: mol_type = other DNA
gtgtagataactacgatacgggagggcttaccatctggccccagtgctgcaatgataccgcgagacccacgctcaccggctccagatttatcagcaataaaccagccagccggaagggccgagcgcagaagtggtcctgcaactttatccgcctccatccagtctattaattgttgccgggaagctagagtaagtagttcgccagttaatagtttgcgcaacgttgttgccattgctacaggcatcgtggtgtcacgctcgtcgtttggtatggcttcattcagctccggttcccaacgatcaaggcgagttacatgatcccccatgttgtgcaaaaaagcggttagctccttcggtcctccgatcgttgtcagaagtaagttggccgcagtgttatcactcatggttatggcagcactgcataattctcttactgtcatgccatccgtaagatgcttttctgtgactggtgagtactcaaccaagtcattctgagaatagtgtatgcggcgaccgagttgctcttgcccggcgtcaatacgggataataccgcgccacatagcagaactttaaaagtgctcatcattggaaaacgttcttcggggcgaaaactctcaaggatcttaccgctgttgagatccagttcgatgtaacccactcgtgcacccaactgatcttcagcatcttttactttcaccagcgtttctgggtgagcaaaaacaggaaggcaaaatgccgcaaaaaagggaataagggcgacacggaaatgttgaatactcatactcttcctttttcaatattattgaagcatttatcagggttattgtctcatgagcggatacatatttgaatgtatttagaaaaataaacaaataggggttccgcgcacatttccccgaaaagtgccacctgacgtctaagaaaccattattatcatgacattaacctataaaaataggcgtatcacgaggccctttcgtctcgcgcgtttcggtgatgacggtgaaaacctctgacacatgcagctcccggagacggtcacagcttgtctgccatggacatgtttatattaaatactcgtattgctgttcgattatgaccgaattccctgtcgtgccagctgcattaatgaatcggccaacgcgcggggagaggcggtttgcgtattgggcgctcttccgcttcctcgctcactgactcgctgcgctcggtcgttcggctgcggcgagcggtatcagctcactcaaaggcggtaatacggttatccacagaatcaggggataacgcaggaaagaacatgtgagcaaaaggccagcaaaaggccaggaaccgtaaaaaggccgcgttgctggcgtttttccataggctccgcccccctgacgagcatcacaaaaatcgacgctcaagtcagaggtggcgaaacccgacaggactataaagataccaggcgtttccccctggaagctccctcgtgcgctctcctgttccgaccctgccgcttaccggatacctgtccgcctttctcccttcgggaagcgtggcgctttctcatagctcacgctgtaggtatctcagttcggtgtaggtcgttcgctccaagctgggctgtgtgcacgaaccccccgttcagcccgaccgctgcgccttatccggtaactatcgtcttgagtccaacccggtaagacacgacttatcgccactggcagcagccactggtaacaggattagcagagcgaggtatgtaggcggtgctacagagttcttgaagtggtggcctaactacggctacactagaagaacagtatttggtatctgcgctctgctgaagccagttaccttcggaaaaagagttggtagctcttgatccggcaaacaaaccaccgctggtagcggtggtttttttgtttgcaagcagcagattacgcgcagaaaaaaaggatctcaagaagatcctttgatcttttctacggggtctgacgctcagtggaacgaaaactcacgttaagggattttggtcatgagattatcaaaaaggatcttcacctagatccttttaaattaaaaatgaagttttaaatcaatctaaagtatatatgagtaaacttggtctgacagttaccaatgcttaatcagtgaggcacctatctcagcgatctgtctatttcgttcatccatagttgcctgactccccgtc

SEQ ID NO: 1413 - DNA, 45 bp, synthetic construct
  misc_feature 1..45: note = Description of Artificial Sequence: Syntheticoligonucleotide
  source 1..45: mol_type = other DNA
acgcgttttagaagagcagcttgttaaggccaaagaacagattga

SEQ ID NO: 1414 - DNA, 44 bp, synthetic construct
  misc_feature 1..44: note = Description of Artificial Sequence: Syntheticoligonucleotide
  source 1..44: mol_type = other DNA
aaagatttgtccttggagaacggtgctcatgcttacaaccggga

SEQ ID NO: 1415 - DNA, 30 bp, synthetic construct
  misc_feature 1..30: note = Description of Artificial Sequence: Syntheticoligonucleotide
  source 1..30: mol_type = other DNA
ttgcccaggatgttgccatcctccttgaaa

SEQ ID NO: 1416 - DNA, 20 bp, synthetic construct
  misc_feature 1..20: note = Description of Artificial Sequence: Syntheticoligonucleotide
  source 1..20: mol_type = other DNA
ttaaggccaaagaacagatt

SEQ ID NO: 1417 - DNA, 20 bp, synthetic construct
  misc_feature 1..20: note = Description of Artificial Sequence: Syntheticoligonucleotide
  source 1..20: mol_type = other DNA
cgtgatggtctcgattgagt

SEQ ID NO: 1418 - DNA, 20 bp, synthetic construct
  misc_feature 1..20: note = Description of Artificial Sequence: Syntheticoligonucleotide
  source 1..20: mol_type = other DNA
aagaagtcgtgctgcttcat

SEQ ID NO: 1419 - DNA, 20 bp, synthetic construct
  misc_feature 1..20: note = Description of Artificial Sequence: Syntheticoligonucleotide
  source 1..20: mol_type = other DNA
atctgcaccaccggcaagct

SEQ ID NO: 1420 - DNA, 20 bp, synthetic construct
  misc_feature 1..20: note = Description of Artificial Sequence: Syntheticoligonucleotide
  source 1..20: mol_type = other DNA
tggcggatcttgaagttcac

SEQ ID NO: 1421 - DNA, 20 bp, synthetic construct
  misc_feature 1..20: note = Description of Artificial Sequence: Syntheticoligonucleotide
  source 1..20: mol_type = other DNA
ccgtaggtggcatcgccctc

SEQ ID NO: 1422 - DNA, 20 bp, synthetic construct
  misc_feature 1..20: note = Description of Artificial Sequence: Syntheticoligonucleotide
  source 1..20: mol_type = other DNA
acgtcgccgtccagctcgac

SEQ ID NO: 1423 - DNA, 20 bp, synthetic construct
  misc_feature 1..20: note = Description of Artificial Sequence: Syntheticoligonucleotide
  source 1..20: mol_type = other DNA
aagaagatggtgcgctcctg

SEQ ID NO: 1424 - DNA, 20 bp, synthetic construct
  misc_feature 1..20: note = Description of Artificial Sequence: Syntheticoligonucleotide
  source 1..20: mol_type = other DNA
gaagagcagcttgttaaggc

SEQ ID NO: 1425 - DNA, 20 bp, synthetic construct
  misc_feature 1..20: note = Description of Artificial Sequence: Syntheticoligonucleotide
  source 1..20: mol_type = other DNA
gccttaacaagctgctcttc

SEQ ID NO: 1426 - DNA, 20 bp, synthetic construct
  misc_feature 1..20: note = Description of Artificial Sequence: Syntheticoligonucleotide
  source 1..20: mol_type = other DNA
attgatcaggggccagctat

SEQ ID NO: 1427 - DNA, 20 bp, synthetic construct
  misc_feature 1..20: note = Description of Artificial Sequence: Syntheticoligonucleotide
  source 1..20: mol_type = other DNA
acgcgtactcttcctatagc

SEQ ID NO: 1428 - DNA, 20 bp, synthetic construct
  misc_feature 1..20: note = Description of Artificial Sequence: Syntheticoligonucleotide
  source 1..20: mol_type = other DNA
cgtgatggtctcgattgagt

SEQ ID NO: 1429 - RNA, 20 nt, synthetic construct
  misc_feature 1..20: note = Description of Artificial Sequence: Syntheticoligonucleotide
  source 1..20: mol_type = other RNA
gggccgagatgtctcgctcc

SEQ ID NO: 1430 - RNA, 56 nt, synthetic construct
  misc_feature 1..56: note = Description of Artificial Sequence: Syntheticoligonucleotide
  source 1..56: mol_type = other RNA
ctttcaagactaatagattgctccttacgaggagacgggccgagatgtctcgctcc

SEQ ID NO: 1431 - DNA, 20 bp, synthetic construct
  misc_feature 1..20: note = Description of Artificial Sequence: Syntheticoligonucleotide
  source 1..20: mol_type = other DNA
ggccgagatgtctcgctccg

SEQ ID NO: 1432 - RNA, 56 nt, synthetic construct
  misc_feature 1..56: note = Description of Artificial Sequence: Syntheticoligonucleotide
  source 1..56: mol_type = other RNA
ctttcaagactaatagattgctccttacgaggagacgagtctctcagctggtacac

SEQ ID NO: 1433 - RNA, 20 nt, synthetic construct
  misc_feature 1..20: note = Description of Artificial Sequence: Syntheticoligonucleotide
  source 1..20: mol_type = other RNA
attgctccttacgaggagac

SEQ ID NO: 1434 - RNA, 20 nt, synthetic construct
  misc_feature 1..20: note = Description of Artificial Sequence: Syntheticoligonucleotide
  source 1..20: mol_type = other RNA
cagtgggggtgaattcagtg

SEQ ID NO: 1435 - RNA, 40 nt, synthetic construct
  misc_feature 1..40: note = Description of Artificial Sequence: Syntheticoligonucleotide
  source 1..40: mol_type = other RNA
attgctccttacgaggagaccagtgggggtgaattcagtg

SEQ ID NO: 1436 - RNA, 20 nt, synthetic construct
  misc_feature 1..20: note = Description of Artificial Sequence: Syntheticoligonucleotide
  source 1..20: mol_type = other RNA
gagtctctcagctggtacac

SEQ ID NO: 1437 - RNA, 40 nt, synthetic construct
  misc_feature 1..40: note = Description of Artificial Sequence: Syntheticoligonucleotide
  source 1..40: mol_type = other RNA
attgctccttacgaggagacgagtctctcagctggtacac

SEQ ID NO: 1438 - RNA, 17 nt, synthetic construct
  misc_feature 1..17: note = Description of Artificial Sequence: Syntheticoligonucleotide
  source 1..17: mol_type = other RNA
cagtgggggtgaattca

SEQ ID NO: 1439 - RNA, 37 nt, synthetic construct
  misc_feature 1..37: note = Description of Artificial Sequence: Syntheticoligonucleotide
  source 1..37: mol_type = other RNA
attgctccttacgaggagaccagtgggggtgaattca

SEQ ID NO: 1440 - RNA, 17 nt, synthetic construct
  misc_feature 1..17: note = Description of Artificial Sequence: Syntheticoligonucleotide
  source 1..17: mol_type = other RNA
cagtgggggtgaattca

SEQ ID NO: 1441 - RNA, 37 nt, synthetic construct
  misc_feature 1..37: note = Description of Artificial Sequence: Syntheticoligonucleotide
  source 1..37: mol_type = other RNA
attgctccttacgaggagacgagtctctcagctggta

SEQ ID NO: 1442 - RNA, 56 nt, synthetic construct
  misc_feature 1..56: note = Description of Artificial Sequence: Syntheticoligonucleotide
  source 1..56: mol_type = other RNA
ctttcaagactaatagattgctccttacgaggagacaggaatacatggtacacgtt

SEQ ID NO: 1443 - RNA, 45 nt, synthetic construct
  misc_feature 1..45: note = Description of Artificial Sequence: Syntheticoligonucleotide
  source 1..45: mol_type = other RNA
aatagattgctccttacgaggagacaggaatacatggtacacgtt

SEQ ID NO: 1444 - DNA, 45 bp, synthetic construct
  misc_feature 1..45: note = Description of Artificial Sequence: Syntheticoligonucleotide
  misc_feature 1..45: note = Description of Combined DNA/RNA Molecule: Syntheticoligonucleotide
  source 1..45: mol_type = other DNA
aatagattgctccttacgaggagacaggaatacatggtacacgtt

SEQ ID NO: 1445 - RNA, 56 nt, synthetic construct; identical to SEQ ID NO: 1442
  misc_feature 1..56: note = Description of Artificial Sequence: Syntheticoligonucleotide
  source 1..56: mol_type = other RNA

SEQ ID NO: 1446 - RNA, 45 nt, synthetic construct; identical to SEQ ID NO: 1443
  misc_feature 1..45: note = Description of Artificial Sequence: Syntheticoligonucleotide
  source 1..45: mol_type = other RNA

SEQ ID NO: 1447 - RNA, 56 nt, synthetic construct; identical to SEQ ID NO: 1442
  misc_feature 1..56: note = Description of Artificial Sequence: Syntheticoligonucleotide
  source 1..56: mol_type = other RNA

SEQ ID NO: 1448 - RNA, 45 nt, synthetic construct; identical to SEQ ID NO: 1443
  misc_feature 1..45: note = Description of Artificial Sequence: Syntheticoligonucleotide
  source 1..45: mol_type = other RNA

SEQ ID NO: 1449 - RNA, 56 nt, synthetic construct; identical to SEQ ID NO: 1442
  misc_feature 1..56: note = Description of Artificial Sequence: Syntheticoligonucleotide
  source 1..56: mol_type = other RNA

SEQ ID NO: 1450 - RNA, 45 nt, synthetic construct; identical to SEQ ID NO: 1443
  misc_feature 1..45: note = Description of Artificial Sequence: Syntheticoligonucleotide
  source 1..45: mol_type = other RNA

SEQ ID NO: 1451 - RNA, 57 nt, synthetic construct
  misc_feature 1..57: note = Description of Artificial Sequence: Syntheticoligonucleotide
  source 1..57: mol_type = other RNA
ctttcaagactaatagattgctccttacgaggagacaggaatacatggtacacgttg

SEQ ID NO: 1452 - RNA, 46 nt, synthetic construct
  misc_feature 1..46: note = Description of Artificial Sequence: Syntheticoligonucleotide
  source 1..46: mol_type = other RNA
aatagattgctccttacgaggagacaggaatacatggtacacgttg

SEQ ID NO: 1453 - DNA, 56 bp, synthetic construct; identical to SEQ ID NO: 1327
  misc_feature 1..56: note = Description of Artificial Sequence: Syntheticoligonucleotide
  misc_feature 1..56: note = Description of Combined DNA/RNA Molecule: Syntheticoligonucleotide
  source 1..56: mol_type = other DNA

SEQ ID NO: 1454 - DNA, 56 bp, synthetic construct; identical to SEQ ID NO: 1327
  misc_feature 1..56: note = Description of Artificial Sequence: Syntheticoligonucleotide
  misc_feature 1..56: note = Description of Combined DNA/RNA Molecule: Syntheticoligonucleotide
  source 1..56: mol_type = other DNA

SEQ ID NO: 1455 - DNA, 56 bp, synthetic construct; identical to SEQ ID NO: 1327
  misc_feature 1..56: note = Description of Artificial Sequence: Syntheticoligonucleotide
  misc_feature 1..56: note = Description of Combined DNA/RNA Molecule: Syntheticoligonucleotide
  source 1..56: mol_type = other DNA

SEQ ID NO: 1456 - DNA, 56 bp, synthetic construct; identical to SEQ ID NO: 1327
  misc_feature 1..56: note = Description of Artificial Sequence: Syntheticoligonucleotide
  misc_feature 1..56: note = Description of Combined DNA/RNA Molecule: Syntheticoligonucleotide
  source 1..56: mol_type = other DNA

SEQ ID NO: 1457 - DNA, 56 bp, synthetic construct; identical to SEQ ID NO: 1327
  misc_feature 1..56: note = Description of Artificial Sequence: Syntheticoligonucleotide
  misc_feature 1..56: note = Description of Combined DNA/RNA Molecule: Syntheticoligonucleotide
  source 1..56: mol_type = other DNA

SEQ ID NO: 1458 - DNA, 56 bp, synthetic construct; identical to SEQ ID NO: 1327
  misc_feature 1..56: note = Description of Artificial Sequence: Syntheticoligonucleotide
  misc_feature 1..56: note = Description of Combined DNA/RNA Molecule: Syntheticoligonucleotide
  source 1..56: mol_type = other DNA

SEQ ID NO: 1459 - DNA, 56 bp, synthetic construct; identical to SEQ ID NO: 1327
  misc_feature 1..56: note = Description of Artificial Sequence: Syntheticoligonucleotide
  misc_feature 1..56: note = Description of Combined DNA/RNA Molecule: Syntheticoligonucleotide
  source 1..56: mol_type = other DNA

SEQ ID NO: 1460 - DNA, 56 bp, synthetic construct; identical to SEQ ID NO: 1327
  misc_feature 1..56: note = Description of Artificial Sequence: Syntheticoligonucleotide
  misc_feature 1..56: note = Description of Combined DNA/RNA Molecule: Syntheticoligonucleotide
  source 1..56: mol_type = other DNA

SEQ ID NO: 1461 - DNA, 45 bp, synthetic construct; identical to SEQ ID NO: 1444
  misc_feature 1..45: note = Description of Artificial Sequence: Syntheticoligonucleotide
  misc_feature 1..45: note = Description of Combined DNA/RNA Molecule: Syntheticoligonucleotide
  source 1..45: mol_type = other DNA

SEQ ID NO: 1462 - RNA, 52 nt, synthetic construct
  misc_feature 1..52: note = Description of Artificial Sequence: Syntheticoligonucleotide
  source 1..52: mol_type = other RNA
aatagattgctccttacgaggagacaggaatacatggtacacgttaaaaaaa

SEQ ID NO: 1463 - DNA, 56 bp, synthetic construct; identical to SEQ ID NO: 1327
  misc_feature 1..56: note = Description of Artificial Sequence: Syntheticoligonucleotide
  misc_feature 1..56: note = Description of Combined DNA/RNA Molecule: Syntheticoligonucleotide
  source 1..56: mol_type = other DNA

SEQ ID NO: 1464 - RNA, 45 nt, synthetic construct; identical to SEQ ID NO: 1443
  misc_feature 1..45: note = Description of Artificial Sequence: Syntheticoligonucleotide
  source 1..45: mol_type = other RNA

SEQ ID NO: 1465 - RNA, 56 nt, synthetic construct; identical to SEQ ID NO: 1442
  misc_feature 1..56: note = Description of Artificial Sequence: Syntheticoligonucleotide
  source 1..56: mol_type = other RNA

SEQ ID NO: 1466 - RNA, 35 nt, synthetic construct
  misc_feature 1..35: note = Description of Artificial Sequence: Syntheticoligonucleotide
  source 1..35: mol_type = other RNA
tttcaagactaatagattgctccttacgaggagac

SEQ ID NO: 1467 - RNA, 34 nt, synthetic construct
  misc_feature 1..34: note = Description of Artificial Sequence: Syntheticoligonucleotide
  source 1..34: mol_type = other RNA
ttcaagactaatagattgctccttacgaggagac

SEQ ID NO: 1468 - RNA, 33 nt, synthetic construct
  misc_feature 1..33: note = Description of Artificial Sequence: Syntheticoligonucleotide
  source 1..33: mol_type = other RNA
tcaagactaatagattgctccttacgaggagac

SEQ ID NO: 1469 - RNA, 32 nt, synthetic construct
  misc_feature 1..32: note = Description of Artificial Sequence: Syntheticoligonucleotide
  source 1..32: mol_type = other RNA
caagactaatagattgctccttacgaggagac

SEQ ID NO: 1470 - RNA, 31 nt, synthetic construct
  misc_feature 1..31: note = Description of Artificial Sequence: Syntheticoligonucleotide
  source 1..31: mol_type = other RNA
aagactaatagattgctccttacgaggagac

SEQ ID NO: 1471 - RNA, 30 nt, synthetic construct
  misc_feature 1..30: note = Description of Artificial Sequence: Syntheticoligonucleotide
  source 1..30: mol_type = other RNA
agactaatagattgctccttacgaggagac

SEQ ID NO: 1472 - RNA, 29 nt, synthetic construct
  misc_feature 1..29: note = Description of Artificial Sequence: Syntheticoligonucleotide
  source 1..29: mol_type = other RNA
gactaatagattgctccttacgaggagac

SEQ ID NO: 1473 - RNA, 28 nt, synthetic construct
  misc_feature 1..28: note = Description of Artificial Sequence: Syntheticoligonucleotide
  source 1..28: mol_type = other RNA
actaatagattgctccttacgaggagac

SEQ ID NO: 1474 - RNA, 27 nt, synthetic construct
  misc_feature 1..27: note = Description of Artificial Sequence: Syntheticoligonucleotide
  source 1..27: mol_type = other RNA
ctaatagattgctccttacgaggagac

SEQ ID NO: 1475 - RNA, 26 nt, synthetic construct
  misc_feature 1..26: note = Description of Artificial Sequence: Syntheticoligonucleotide
  source 1..26: mol_type = other RNA
taatagattgctccttacgaggagac

SEQ ID NO: 1476 - RNA, 25 nt, synthetic construct
  misc_feature 1..25: note = Description of Artificial Sequence: Syntheticoligonucleotide
  source 1..25: mol_type = other RNA
aatagattgctccttacgaggagac

SEQ ID NO: 1477 - RNA, 24 nt, synthetic construct
  misc_feature 1..24: note = Description of Artificial Sequence: Syntheticoligonucleotide
  source 1..24: mol_type = other RNA
atagattgctccttacgaggagac

SEQ ID NO: 1478 - RNA, 23 nt, synthetic construct
  misc_feature 1..23: note = Description of Artificial Sequence: Syntheticoligonucleotide
  source 1..23: mol_type = other RNA
tagattgctccttacgaggagac

SEQ ID NO: 1479 - RNA, 22 nt, synthetic construct
  misc_feature 1..22: note = Description of Artificial Sequence: Syntheticoligonucleotide
  source 1..22: mol_type = other RNA
agattgctccttacgaggagac

SEQ ID NO: 1480 - RNA, 21 nt, synthetic construct
  misc_feature 1..21: note = Description of Artificial Sequence: Syntheticoligonucleotide
  source 1..21: mol_type = other RNA
gattgctccttacgaggagac

SEQ ID NO: 1481 - RNA, 20 nt, synthetic construct
  misc_feature 1..20: note = Description of Artificial Sequence: Syntheticoligonucleotide
  source 1..20: mol_type = other RNA
attgctccttacgaggagac

SEQ ID NO: 1482 - RNA, 30 nt, synthetic construct
  misc_feature 1..30: note = Description of Artificial Sequence: Syntheticoligonucleotide
  source 1..30: mol_type = other RNA
aggaatacatggtacacgttgaagaacatt

SEQ ID NO: 1483 - RNA, 29 nt, synthetic construct
  misc_feature 1..29: note = Description of Artificial Sequence: Syntheticoligonucleotide
  source 1..29: mol_type = other RNA
aggaatacatggtacacgttgaagaacat

SEQ ID NO: 1484 - RNA, 28 nt, synthetic construct
  misc_feature 1..28: note = Description of Artificial Sequence: Syntheticoligonucleotide
  source 1..28: mol_type = other RNA
aggaatacatggtacacgttgaagaaca

SEQ ID NO: 1485 - RNA, 27 nt, synthetic construct
  misc_feature 1..27: note = Description of Artificial Sequence: Syntheticoligonucleotide
  source 1..27: mol_type = other RNA
aggaatacatggtacacgttgaagaac

SEQ ID NO: 1486 - RNA, 26 nt, synthetic construct
  misc_feature 1..26: note = Description of Artificial Sequence: Syntheticoligonucleotide
  source 1..26: mol_type = other RNA
aggaatacatggtacacgttgaagaa

SEQ ID NO: 1487 - RNA, 25 nt, synthetic construct
  misc_feature 1..25: note = Description of Artificial Sequence: Syntheticoligonucleotide
  source 1..25: mol_type = other RNA
aggaatacatggtacacgttgaaga

SEQ ID NO: 1488 - RNA, 24 nt, synthetic construct
  misc_feature 1..24: note = Description of Artificial Sequence: Syntheticoligonucleotide
  source 1..24: mol_type = other RNA
aggaatacatggtacacgttgaag

SEQ ID NO: 1489 - RNA, 23 nt, synthetic construct
  misc_feature 1..23: note = Description of Artificial Sequence: Syntheticoligonucleotide
  source 1..23: mol_type = other RNA
aggaatacatggtacacgttgaa

SEQ ID NO: 1490 - RNA, 22 nt, synthetic construct
  misc_feature 1..22: note = Description of Artificial Sequence: Syntheticoligonucleotide
  source 1..22: mol_type = other RNA
aggaatacatggtacacgttga

SEQ ID NO: 1491 - RNA, 21 nt, synthetic construct
  misc_feature 1..21: note = Description of Artificial Sequence: Syntheticoligonucleotide
  source 1..21: mol_type = other RNA
aggaatacatggtacacgttg

SEQ ID NO: 1492 - RNA, 20 nt, synthetic construct
  misc_feature 1..20: note = Description of Artificial Sequence: Syntheticoligonucleotide
  source 1..20: mol_type = other RNA
aggaatacatggtacacgtt

SEQ ID NO: 1493 - RNA, 19 nt, synthetic construct
  misc_feature 1..19: note = Description of Artificial Sequence: Syntheticoligonucleotide
  source 1..19: mol_type = other RNA
aggaatacatggtacacgt

SEQ ID NO: 1494 - RNA, 18 nt, synthetic construct
  misc_feature 1..18: note = Description of Artificial Sequence: Syntheticoligonucleotide
  source 1..18: mol_type = other RNA
aggaatacatggtacacg

SEQ ID NO: 1495 - RNA, 17 nt, synthetic construct
  misc_feature 1..17: note = Description of Artificial Sequence: Syntheticoligonucleotide
  source 1..17: mol_type = other RNA
aggaatacatggtacac

SEQ ID NO: 1496 - RNA, 16 nt, synthetic construct
  misc_feature 1..16: note = Description of Artificial Sequence: Syntheticoligonucleotide
  source 1..16: mol_type = other RNA
aggaatacatggtaca

SEQ ID NO: 1497 - RNA, 15 nt, synthetic construct
  misc_feature 1..15: note = Description of Artificial Sequence: Syntheticoligonucleotide
  source 1..15: mol_type = other RNA
aggaatacatggtac

SEQ ID NO: 1498 - RNA, 20 nt, synthetic construct
  misc_feature 1..20: note = Description of Artificial Sequence: Syntheticoligonucleotide
  source 1..20: mol_type = other RNA
aggaatacatggtacacgtt

SEQ ID NO: 1499 - RNA, 66 nt, synthetic construct
  misc_feature 1..66: note = Description of Artificial Sequence: Syntheticoligonucleotide
  source 1..66: mol_type = other RNA
ctttcaagactaatagattgctccttacgaggagacaggaatacatggtacacgttgaagaacatt

SEQ ID NO: 1500 - RNA, 65 nt, synthetic construct
  misc_feature 1..65: note = Description of Artificial Sequence: Syntheticoligonucleotide
  source 1..65: mol_type = other RNA
ctttcaagactaatagattgctccttacgaggagacaggaatacatggtacacgttgaagaacat

SEQ ID NO: 1501 - RNA, 64 nt, synthetic construct
  misc_feature 1..64: note = Description of Artificial Sequence: Syntheticoligonucleotide
  source 1..64: mol_type = other RNA
ctttcaagactaatagattgctccttacgaggagacaggaatacatggtacacgttgaagaaca

SEQ ID NO: 1502 - RNA, 63 nt, synthetic construct
  misc_feature 1..63: note = Description of Artificial Sequence: Syntheticoligonucleotide
  source 1..63: mol_type = other RNA
ctttcaagactaatagattgctccttacgaggagacaggaatacatggtacacgttgaagaac

SEQ ID NO: 1503 - RNA, 62 nt, synthetic construct
  misc_feature 1..62: note = Description of Artificial Sequence: Syntheticoligonucleotide
  source 1..62: mol_type = other RNA
ctttcaagactaatagattgctccttacgaggagacaggaatacatggtacacgttgaagaa

SEQ ID NO: 1504 - RNA, 61 nt, synthetic construct
  misc_feature 1..61: note = Description of Artificial Sequence: Syntheticoligonucleotide
  source 1..61: mol_type = other RNA
ctttcaagactaatagattgctccttacgaggagacaggaatacatggtacacgttgaaga

SEQ ID NO: 1505 - RNA, 60 nt, synthetic construct
  misc_feature 1..60: note = Description of Artificial Sequence: Syntheticoligonucleotide
  source 1..60: mol_type = other RNA
ctttcaagactaatagattgctccttacgaggagacaggaatacatggtacacgttgaag

SEQ ID NO: 1506 - RNA, 59 nt, synthetic construct
  misc_feature 1..59: note = Description of Artificial Sequence: Syntheticoligonucleotide
  source 1..59: mol_type = other RNA
ctttcaagactaatagattgctccttacgaggagacaggaatacatggtacacgttgaa

SEQ ID NO: 1507 - RNA, 58 nt, synthetic construct
  misc_feature 1..58: note = Description of Artificial Sequence: Syntheticoligonucleotide
  source 1..58: mol_type = other RNA
ctttcaagactaatagattgctccttacgaggagacaggaatacatggtacacgttga

SEQ ID NO: 1508 - RNA, 57 nt, synthetic construct; identical to SEQ ID NO: 1451
  misc_feature 1..57: note = Description of Artificial Sequence: Syntheticoligonucleotide
  source 1..57: mol_type = other RNA

SEQ ID NO: 1509 - RNA, 56 nt, synthetic construct; identical to SEQ ID NO: 1442
  misc_feature 1..56: note = Description of Artificial Sequence: Syntheticoligonucleotide
  source 1..56: mol_type = other RNA

SEQ ID NO: 1510 - RNA, 55 nt, synthetic construct
  misc_feature 1..55: note = Description of Artificial Sequence: Syntheticoligonucleotide
  source 1..55: mol_type = other RNA
ctttcaagactaatagattgctccttacgaggagacaggaatacatggtacacgt

SEQ ID NO: 1511 - RNA, 54 nt, synthetic construct
  misc_feature 1..54: note = Description of Artificial Sequence: Syntheticoligonucleotide
  source 1..54: mol_type = other RNA
ctttcaagactaatagattgctccttacgaggagacaggaatacatggtacacg

SEQ ID NO: 1512 - RNA, 53 nt, synthetic construct
  misc_feature 1..53: note = Description of Artificial Sequence: Syntheticoligonucleotide
  source 1..53: mol_type = other RNA
ctttcaagactaatagattgctccttacgaggagacaggaatacatggtacac

SEQ ID NO: 1513 - RNA, 52 nt, synthetic construct
  misc_feature 1..52: note = Description of Artificial Sequence: Syntheticoligonucleotide
  source 1..52: mol_type = other RNA
ctttcaagactaatagattgctccttacgaggagacaggaatacatggtaca

SEQ ID NO: 1514 - RNA, 51 nt, synthetic construct
  misc_feature 1..51: note = Description of Artificial Sequence: Syntheticoligonucleotide
  source 1..51: mol_type = other RNA
ctttcaagactaatagattgctccttacgaggagacaggaatacatggtac

SEQ ID NO: 1515 - RNA, 55 nt, synthetic construct
  misc_feature 1..55: note = Description of Artificial Sequence: Syntheticoligonucleotide
  source 1..55: mol_type = other RNA
tttcaagactaatagattgctccttacgaggagacaggaatacatggtacacgtt

SEQ ID NO: 1516 - RNA, 54 nt, synthetic construct
  misc_feature 1..54: note = Description of Artificial Sequence: Syntheticoligonucleotide
  source 1..54: mol_type = other RNA
ttcaagactaatagattgctccttacgaggagacaggaatacatggtacacgtt

SEQ ID NO: 1517 - RNA, 53 nt, synthetic construct
  misc_feature 1..53: note = Description of Artificial Sequence: Syntheticoligonucleotide
  source 1..53: mol_type = other RNA
tcaagactaatagattgctccttacgaggagacaggaatacatggtacacgtt

SEQ ID NO: 1518 - RNA, 52 nt, synthetic construct
  misc_feature 1..52: note = Description of Artificial Sequence: Syntheticoligonucleotide
  source 1..52: mol_type = other RNA
caagactaatagattgctccttacgaggagacaggaatacatggtacacgtt

SEQ ID NO: 1519 - RNA, 51 nt, synthetic construct
  misc_feature 1..51: note = Description of Artificial Sequence: Syntheticoligonucleotide
  source 1..51: mol_type = other RNA
aagactaatagattgctccttacgaggagacaggaatacatggtacacgtt

SEQ ID NO: 1520 - RNA, 50 nt, synthetic construct
  misc_feature 1..50: note = Description of Artificial Sequence: Syntheticoligonucleotide
  source 1..50: mol_type = other RNA
agactaatagattgctccttacgaggagacaggaatacatggtacacgtt

SEQ ID NO: 1521 - RNA, 49 nt, synthetic construct
  misc_feature 1..49: note = Description of Artificial Sequence: Syntheticoligonucleotide
  source 1..49: mol_type = other RNA
gactaatagattgctccttacgaggagacaggaatacatggtacacgtt

SEQ ID NO: 1522 - RNA, 48 nt, synthetic construct
  misc_feature 1..48: note = Description of Artificial Sequence: Syntheticoligonucleotide
  source 1..48: mol_type = other RNA
actaatagattgctccttacgaggagacaggaatacatggtacacgtt

SEQ ID NO: 1523 - RNA, 47 nt, synthetic construct
  misc_feature 1..47: note = Description of Artificial Sequence: Syntheticoligonucleotide
  source 1..47: mol_type = other RNA
ctaatagattgctccttacgaggagacaggaatacatggtacacgtt

SEQ ID NO: 1524 - RNA, 46 nt, synthetic construct
  misc_feature 1..46: note = Description of Artificial Sequence: Syntheticoligonucleotide
  source 1..46: mol_type = other RNA
taatagattgctccttacgaggagacaggaatacatggtacacgtt

SEQ ID NO: 1525 - RNA, 45 nt, synthetic construct; identical to SEQ ID NO: 1443
  misc_feature 1..45: note = Description of Artificial Sequence: Syntheticoligonucleotide
  source 1..45: mol_type = other RNA

SEQ ID NO: 1526 - RNA, 44 nt, synthetic construct
  misc_feature 1..44: note = Description of Artificial Sequence: Syntheticoligonucleotide
  source 1..44: mol_type = other RNA
atagattgctccttacgaggagacaggaatacatggtacacgtt

SEQ ID NO: 1527 - RNA, 43 nt, synthetic construct
  misc_feature 1..43: note = Description of Artificial Sequence: Syntheticoligonucleotide
  source 1..43: mol_type = other RNA
tagattgctccttacgaggagacaggaatacatggtacacgtt

SEQ ID NO: 1528 - RNA, 42 nt, synthetic construct
  misc_feature 1..42: note = Description of Artificial Sequence: Syntheticoligonucleotide
  source 1..42: mol_type = other RNA
agattgctccttacgaggagacaggaatacatggtacacgtt

SEQ ID NO: 1529 - RNA, 41 nt, synthetic construct
  misc_feature 1..41: note = Description of Artificial Sequence: Syntheticoligonucleotide
  source 1..41: mol_type = other RNA
gattgctccttacgaggagacaggaatacatggtacacgtt

SEQ ID NO: 1530 - RNA, 40 nt, synthetic construct
  misc_feature 1..40: note = Description of Artificial Sequence: Syntheticoligonucleotide
  source 1..40: mol_type = other RNA
attgctccttacgaggagacaggaatacatggtacacgtt

SEQ ID NO: 1531 - DNA, 24 bp, synthetic construct
  misc_feature 1..24: note = Description of Artificial Sequence: Syntheticoligonucleotide
  source 1..24: mol_type = other DNA
atagattgctccttacgaggagac

SEQ ID NO: 1532 - RNA, 56 nt, synthetic construct
  misc_feature 1..56: note = Description of Artificial Sequence: Syntheticoligonucleotide
  source 1..56: mol_type = other RNA
ctttcaagactaatagattgctccttacgaggagacagcaaggactggtctttcta

SEQ ID NO: 1533 - DNA, 37 bp, synthetic construct
  misc_feature 1..37: note = Description of Artificial Sequence: Syntheticoligonucleotide
  source 1..37: mol_type = other DNA
attgctccttacgaggagactggatatctgtgggaca

SEQ ID NO: 1534 - DNA, 37 bp, synthetic construct
  misc_feature 1..37: note = Description of Artificial Sequence: Syntheticoligonucleotide
  source 1..37: mol_type = other DNA
attgctccttacgaggagactcccacagatatccaga

SEQ ID NO: 1535 - DNA, 37 bp, synthetic construct
  misc_feature 1..37: note = Description of Artificial Sequence: Syntheticoligonucleotide
  source 1..37: mol_type = other DNA
attgctccttacgaggagacgagtctctcagctggta

SEQ ID NO: 1536 - DNA, 37 bp, synthetic construct
  misc_feature 1..37: note = Description of Artificial Sequence: Syntheticoligonucleotide
  source 1..37: mol_type = other DNA
attgctccttacgaggagacagagtctctcagctggt

SEQ ID NO: 1537 - DNA, 37 bp, synthetic construct
  misc_feature 1..37: note = Description of Artificial Sequence: Syntheticoligonucleotide
  source 1..37: mol_type = other DNA
attgctccttacgaggagactcactggatttagagtc

SEQ ID NO: 1538 - DNA, 37 bp, synthetic construct
  misc_feature 1..37: note = Description of Artificial Sequence: Syntheticoligonucleotide
  source 1..37: mol_type = other DNA
attgctccttacgaggagacagaatcaaaatcggtga

SEQ ID NO: 1539 - DNA, 37 bp, synthetic construct
  misc_feature 1..37: note = Description of Artificial Sequence: Syntheticoligonucleotide
  source 1..37: mol_type = other DNA
attgctccttacgaggagacgagaatcaaaatcggtg

SEQ ID NO: 1540 - DNA, 37 bp, synthetic construct
  misc_feature 1..37: note = Description of Artificial Sequence: Syntheticoligonucleotide
  source 1..37: mol_type = other DNA
attgctccttacgaggagacaccgattttgattctca

SEQ ID NO: 1541 - DNA, 37 bp, synthetic construct
  misc_feature 1..37: note = Description of Artificial Sequence: Syntheticoligonucleotide
  source 1..37: mol_type = other DNA
attgctccttacgaggagactttgagaatcaaaatcg

SEQ ID NO: 1542 - DNA, 37 bp, synthetic construct
  misc_feature 1..37: note = Description of Artificial Sequence: Syntheticoligonucleotide
  source 1..37: mol_type = other DNA
attgctccttacgaggagacgtttgagaatcaaaatc

SEQ ID NO: 1543 - DNA, 37 bp, synthetic construct
  misc_feature 1..37: note = Description of Artificial Sequence: Syntheticoligonucleotide
  source 1..37: mol_type = other DNA
attgctccttacgaggagactgattctcaaacaaatg

SEQ ID NO: 1544 - DNA, 37 bp, synthetic construct
  misc_feature 1..37: note = Description of Artificial Sequence: Syntheticoligonucleotide
  source 1..37: mol_type = other DNA
attgctccttacgaggagacgattctcaaacaaatgt

SEQ ID NO: 1545 - DNA, 37 bp, synthetic construct
  misc_feature 1..37: note = Description of Artificial Sequence: Syntheticoligonucleotide
  source 1..37: mol_type = other DNA
attgctccttacgaggagacattctcaaacaaatgtg

SEQ ID NO: 1546 - DNA, 37 bp, synthetic construct
  misc_feature 1..37: note = Description of Artificial Sequence: Syntheticoligonucleotide
  source 1..37: mol_type = other DNA
attgctccttacgaggagactgacacatttgtttgag

SEQ ID NO: 1547 - DNA, 37 bp, synthetic construct
  misc_feature 1..37: note = Description of Artificial Sequence: Syntheticoligonucleotide
  source 1..37: mol_type = other DNA
attgctccttacgaggagactcaaacaaatgtgtcac

SEQ ID NO: 1548 - DNA, 37 bp, synthetic construct
  misc_feature 1..37: note = Description of Artificial Sequence: Syntheticoligonucleotide
  source 1..37: mol_type = other DNA
attgctccttacgaggagacgtgacacatttgtttga

SEQ ID NO: 1549 - DNA, 37 bp, synthetic construct
  misc_feature 1..37: note = Description of Artificial Sequence: Syntheticoligonucleotide
  source 1..37: mol_type = other DNA
attgctccttacgaggagacctttgtgacacatttgt

SEQ ID NO: 1550 - DNA, 37 bp, synthetic construct
  misc_feature 1..37: note = Description of Artificial Sequence: Syntheticoligonucleotide
  source 1..37: mol_type = other DNA
attgctccttacgaggagactgatgtgtatatcacag

SEQ ID NO: 1551 - DNA, 37 bp, synthetic construct
  misc_feature 1..37: note = Description of Artificial Sequence: Syntheticoligonucleotide
  source 1..37: mol_type = other DNA
attgctccttacgaggagactctgtgatatacacatc

SEQ ID NO: 1552 - DNA, 37 bp, synthetic construct
  misc_feature 1..37: note = Description of Artificial Sequence: Syntheticoligonucleotide
  source 1..37: mol_type = other DNA
attgctccttacgaggagacgtctgtgatatacacat

SEQ ID NO: 1553 - DNA, 37 bp, synthetic construct
  misc_feature 1..37: note = Description of Artificial Sequence: Syntheticoligonucleotide
  source 1..37: mol_type = other DNA
attgctccttacgaggagactgtctgtgatatacaca

SEQ ID NO: 1554 - DNA, 37 bp, synthetic construct
  misc_feature 1..37: note = Description of Artificial Sequence: Syntheticoligonucleotide
  source 1..37: mol_type = other DNA
attgctccttacgaggagacaagtccatagacctcat

SEQ ID NO: 1555 - DNA, 37 bp, synthetic construct
  misc_feature 1..37: note = Description of Artificial Sequence: Syntheticoligonucleotide
  source 1..37: mol_type = other DNA
attgctccttacgaggagacctcttgaagtccataga

SEQ ID NO: 1556 - DNA, 37 bp, synthetic construct
  misc_feature 1..37: note = Description of Artificial Sequence: Syntheticoligonucleotide
  source 1..37: mol_type = other DNA
attgctccttacgaggagacaagagcaacagtgctgt

SEQ ID NO: 1557 - DNA, 37 bp, synthetic construct
  misc_feature 1..37: note = Description of Artificial Sequence: Syntheticoligonucleotide
  source 1..37: mol_type = other DNA
attgctccttacgaggagacctccaggccacagcact

SEQ ID NO: 1558 - DNA, 37 bp, synthetic construct
  misc_feature 1..37: note = Description of Artificial Sequence: Syntheticoligonucleotide
  source 1..37: mol_type = other DNA
attgctccttacgaggagacttgctccaggccacagc

SEQ ID NO: 1559 - DNA, 37 bp, synthetic construct
  misc_feature 1..37: note = Description of Artificial Sequence: Syntheticoligonucleotide
  source 1..37: mol_type = other DNA
attgctccttacgaggagacgttgctccaggccacag

SEQ ID NO: 1560 - DNA, 37 bp, synthetic construct
  misc_feature 1..37: note = Description of Artificial Sequence: Syntheticoligonucleotide
  source 1..37: mol_type = other DNA
attgctccttacgaggagaccacatgcaaagtcagat

SEQ ID NO: 1561 - DNA, 37 bp, synthetic construct
  misc_feature 1..37: note = Description of Artificial Sequence: Syntheticoligonucleotide
  source 1..37: mol_type = other DNA
attgctccttacgaggagacgcacatgcaaagtcaga

SEQ ID NO: 1562 - DNA, 37 bp, synthetic construct
  misc_feature 1..37: note = Description of Artificial Sequence: Syntheticoligonucleotide
  source 1..37: mol_type = other DNA
attgctccttacgaggagacgcatgtgcaaacgcctt

SEQ ID NO: 1563 - DNA, 37 bp, synthetic construct
  misc_feature 1..37: note = Description of Artificial Sequence: Syntheticoligonucleotide
  source 1..37: mol_type = other DNA
attgctccttacgaggagacaaggcgtttgcacatgc

SEQ ID NO: 1564 - DNA, 37 bp, synthetic construct
  misc_feature 1..37: note = Description of Artificial Sequence: Syntheticoligonucleotide
  source 1..37: mol_type = other DNA
attgctccttacgaggagaccatgtgcaaacgccttc

SEQ ID NO: 1565 - DNA, 37 bp, synthetic construct
  misc_feature 1..37: note = Description of Artificial Sequence: Syntheticoligonucleotide
  source 1..37: mol_type = other DNA
attgctccttacgaggagacttgaaggcgtttgcaca

SEQ ID NO: 1566 - DNA, 37 bp, synthetic construct
  misc_feature 1..37: note = Description of Artificial Sequence: Syntheticoligonucleotide
  source 1..37: mol_type = other DNA
attgctccttacgaggagacaacaacagcattattcc

SEQ ID NO: 1567 - DNA, 37 bp, synthetic construct
  misc_feature 1..37: note = Description of Artificial Sequence: Syntheticoligonucleotide
  source 1..37: mol_type = other DNA
attgctccttacgaggagactggaataatgctgttgt

SEQ ID NO: 1568 - DNA, 37 bp, synthetic construct
  misc_feature 1..37: note = Description of Artificial Sequence: Syntheticoligonucleotide
  source 1..37: mol_type = other DNA
attgctccttacgaggagacttccagaagacaccttc

SEQ ID NO: 1569 - DNA, 37 bp, synthetic construct
  misc_feature 1..37: note = Description of Artificial Sequence: Syntheticoligonucleotide
  source 1..37: mol_type = other DNA
attgctccttacgaggagaccagaagacaccttcttc

SEQ ID NO: 1570 - DNA, 37 bp, synthetic construct
  misc_feature 1..37: note = Description of Artificial Sequence: Syntheticoligonucleotide
  source 1..37: mol_type = other DNA
attgctccttacgaggagaccctgggctggggaagaa

SEQ ID NO: 1571 - DNA, 37 bp, synthetic construct
  misc_feature 1..37: note = Description of Artificial Sequence: Syntheticoligonucleotide
  source 1..37: mol_type = other DNA
attgctccttacgaggagacttccccagcccaggtaa

SEQ ID NO: 1572 - DNA, 37 bp, synthetic construct
  misc_feature 1..37: note = Description of Artificial Sequence: Syntheticoligonucleotide
  source 1..37: mol_type = other DNA
attgctccttacgaggagaccccagcccaggtaaggg

SEQ ID NO: 1573 - DNA, 37 bp, synthetic construct
  misc_feature 1..37: note = Description of Artificial Sequence: Syntheticoligonucleotide
  source 1..37: mol_type = other DNA
attgctccttacgaggagactaaaaggaaaaacagac

SEQ ID NO: 1574 - DNA, 37 bp, synthetic construct
  misc_feature 1..37: note = Description of Artificial Sequence: Syntheticoligonucleotide
  source 1..37: mol_type = other DNA
attgctccttacgaggagacctaaaaggaaaaacaga

SEQ ID NO: 1575 - DNA, 37 bp, synthetic construct
  misc_feature 1..37: note = Description of Artificial Sequence: Syntheticoligonucleotide
  source 1..37: mol_type = other DNA
attgctccttacgaggagacttccttttagaaagttc

SEQ ID NO: 1576 - DNA, 37 bp, synthetic construct
  misc_feature 1..37: note = Description of Artificial Sequence: Syntheticoligonucleotide
  source 1..37: mol_type = other DNA
attgctccttacgaggagactccttttagaaagttcc

SEQ ID NO: 1577 - DNA, 37 bp, synthetic construct
  misc_feature 1..37: note = Description of Artificial Sequence: Syntheticoligonucleotide
  source 1..37: mol_type = other DNA
attgctccttacgaggagacccttttagaaagttcct

SEQ ID NO: 1578 - DNA, 37 bp, synthetic construct
  misc_feature 1..37: note = Description of Artificial Sequence: Syntheticoligonucleotide
  source 1..37: mol_type = other DNA
attgctccttacgaggagaccttttagaaagttcctg

SEQ ID NO: 1579 - DNA, 37 bp, synthetic construct
  misc_feature 1..37: note = Description of Artificial Sequence: Syntheticoligonucleotide
  source 1..37: mol_type = other DNA
attgctccttacgaggagactagaaagttcctgtgat

SEQ ID NO: 1580 - DNA, 37 bp, synthetic construct
  misc_feature 1..37: note = Description of Artificial Sequence: Syntheticoligonucleotide
  source 1..37: mol_type = other DNA
attgctccttacgaggagacagaaagttcctgtgatg

SEQ ID NO: 1581 - DNA, 37 bp, synthetic construct
  misc_feature 1..37: note = Description of Artificial Sequence: Syntheticoligonucleotide
  source 1..37: mol_type = other DNA
attgctccttacgaggagacgaaagttcctgtgatgt

SEQ ID NO: 1582 - DNA, 37 bp, synthetic construct
  misc_feature 1..37: note = Description of Artificial Sequence: Syntheticoligonucleotide
  source 1..37: mol_type = other DNA
attgctccttacgaggagacacatcacaggaactttc

SEQ ID NO: 1583 - DNA, 37 bp, synthetic construct
  misc_feature 1..37: note = Description of Artificial Sequence: Syntheticoligonucleotide
  source 1..37: mol_type = other DNA
attgctccttacgaggagacctgtgatgtcaagctgg

SEQ ID NO: 1584 - DNA, 37 bp, synthetic construct
  misc_feature 1..37: note = Description of Artificial Sequence: Syntheticoligonucleotide
  source 1..37: mol_type = other DNA
attgctccttacgaggagactcgaccagcttgacatc

SEQ ID NO: 1585 - DNA, 37 bp, synthetic construct
  misc_feature 1..37: note = Description of Artificial Sequence: Syntheticoligonucleotide
  source 1..37: mol_type = other DNA
attgctccttacgaggagacctcgaccagcttgacat

SEQ ID NO: 1586 - DNA, 37 bp, synthetic construct
  misc_feature 1..37: note = Description of Artificial Sequence: Syntheticoligonucleotide
  source 1..37: mol_type = other DNA
attgctccttacgaggagactctcgaccagcttgaca

SEQ ID NO: 1587 - DNA, 37 bp, synthetic construct
  misc_feature 1..37: note = Description of Artificial Sequence: Syntheticoligonucleotide
  source 1..37: mol_type = other DNA
attgctccttacgaggagacaaagcttttctcgacca

SEQ ID NO: 1588 - DNA, 37 bp, synthetic construct
  misc_feature 1..37: note = Description of Artificial Sequence: Syntheticoligonucleotide
  source 1..37: mol_type = other DNA
attgctccttacgaggagaccaaagcttttctcgacc

SEQ ID NO: 1589 - DNA, 37 bp, synthetic construct
  misc_feature 1..37: note = Description of Artificial Sequence: Syntheticoligonucleotide
  source 1..37: mol_type = other DNA
attgctccttacgaggagaccctgtttcaaagctttt

SEQ ID NO: 1590 - DNA, 37 bp, synthetic construct
  misc_feature 1..37: note = Description of Artificial Sequence: Syntheticoligonucleotide
  source 1..37: mol_type = other DNA
attgctccttacgaggagacgaaacaggtaagacagg

SEQ ID NO: 1591 - DNA, 37 bp, synthetic construct
  misc_feature 1..37: note = Description of Artificial Sequence: Syntheticoligonucleotide
  source 1..37: mol_type = other DNA
attgctccttacgaggagacaaacaggtaagacaggg

SEQ ID NO: 1592 - DNA, 37 bp, synthetic construct
  misc_feature 1..37: note = Description of Artificial Sequence: Syntheticoligonucleotide
  source 1..37: mol_type = other DNA
attgctccttacgaggagaccatccatccgacattga

SEQ ID NO: 1593 - DNA, 37 bp, synthetic construct
  misc_feature 1..37: note = Description of Artificial Sequence: Syntheticoligonucleotide
  source 1..37: mol_type = other DNA
attgctccttacgaggagacatccatccgacattgaa

SEQ ID NO: 1594 - DNA, 37 bp, synthetic construct
  misc_feature 1..37: note = Description of Artificial Sequence: Syntheticoligonucleotide
  source 1..37: mol_type = other DNA
attgctccttacgaggagacagtaagtcaacttcaat

SEQ ID NO: 1595 - DNA, 37 bp, synthetic construct
  misc_feature 1..37: note = Description of Artificial Sequence: Syntheticoligonucleotide
  source 1..37: mol_type = other DNA
attgctccttacgaggagacttcagtaagtcaacttc

SEQ ID NO: 1596 - DNA, 37 bp, synthetic construct
  misc_feature 1..37: note = Description of Artificial Sequence: Syntheticoligonucleotide
  source 1..37: mol_type = other DNA
attgctccttacgaggagacaagttgacttactgaag

SEQ ID NO: 1597 - DNA, 37 bp, synthetic construct
  misc_feature 1..37: note = Description of Artificial Sequence: Syntheticoligonucleotide
  source 1..37: mol_type = other DNA
attgctccttacgaggagacacttactgaagaatgga

SEQ ID NO: 1598 - DNA, 37 bp, synthetic construct
  misc_feature 1..37: note = Description of Artificial Sequence: Syntheticoligonucleotide
  source 1..37: mol_type = other DNA
attgctccttacgaggagactctctccattcttcagt

SEQ ID NO: 1599 - DNA, 37 bp, synthetic construct
  misc_feature 1..37: note = Description of Artificial Sequence: Syntheticoligonucleotide
  source 1..37: mol_type = other DNA
attgctccttacgaggagacctgaagaatggagagag

SEQ ID NO: 1600 - DNA, 37 bp, synthetic construct
  misc_feature 1..37: note = Description of Artificial Sequence: Syntheticoligonucleotide
  source 1..37: mol_type = other DNA
attgctccttacgaggagacaattctctctccattct

SEQ ID NO: 1601 - DNA, 37 bp, synthetic construct
  misc_feature 1..37: note = Description of Artificial Sequence: Syntheticoligonucleotide
  source 1..37: mol_type = other DNA
attgctccttacgaggagaccaattctctctccattc

SEQ ID NO: 1602 - DNA, 37 bp, synthetic construct
  misc_feature 1..37: note = Description of Artificial Sequence: Syntheticoligonucleotide
  source 1..37: mol_type = other DNA
attgctccttacgaggagactcaattctctctccatt

SEQ ID NO: 1603 - DNA, 37 bp, synthetic construct
  misc_feature 1..37: note = Description of Artificial Sequence: Syntheticoligonucleotide
  source 1..37: mol_type = other DNA
attgctccttacgaggagacttcaattctctctccat

SEQ ID NO: 1604 - DNA, 37 bp, synthetic construct
  misc_feature 1..37: note = Description of Artificial Sequence: Syntheticoligonucleotide
  source 1..37: mol_type = other DNA
attgctccttacgaggagacaaaaagtggagcattca

SEQ ID NO: 1605 - DNA, 37 bp, synthetic construct
  misc_feature 1..37: note = Description of Artificial Sequence: Syntheticoligonucleotide
  source 1..37: mol_type = other DNA
attgctccttacgaggagacctgaaagacaagtctga

SEQ ID NO: 1606 - DNA, 37 bp, synthetic construct
  misc_feature 1..37: note = Description of Artificial Sequence: Syntheticoligonucleotide
  source 1..37: mol_type = other DNA
attgctccttacgaggagacagacttgtctttcagca

SEQ ID NO: 1607 - DNA, 37 bp, synthetic construct
  misc_feature 1..37: note = Description of Artificial Sequence: Syntheticoligonucleotide
  source 1..37: mol_type = other DNA
attgctccttacgaggagactctttcagcaaggactg

SEQ ID NO: 1608 - DNA, 37 bp, synthetic construct
  misc_feature 1..37: note = Description of Artificial Sequence: Syntheticoligonucleotide
  source 1..37: mol_type = other DNA
attgctccttacgaggagaccagcaaggactggtctt

SEQ ID NO: 1609 - DNA, 37 bp, synthetic construct
  misc_feature 1..37: note = Description of Artificial Sequence: Syntheticoligonucleotide
  source 1..37: mol_type = other DNA
attgctccttacgaggagacagcaaggactggtcttt

SEQ ID NO: 1610 - DNA, 37 bp, synthetic construct
  misc_feature 1..37: note = Description of Artificial Sequence: Syntheticoligonucleotide
  source 1..37: mol_type = other DNA
attgctccttacgaggagacctatctcttgtactaca

SEQ ID NO: 1611 - DNA, 37 bp, synthetic construct
  misc_feature 1..37: note = Description of Artificial Sequence: Syntheticoligonucleotide
  source 1..37: mol_type = other DNA
attgctccttacgaggagactatctcttgtactacac

SEQ ID NO: 1612 - DNA, 37 bp, synthetic construct
  misc_feature 1..37: note = Description of Artificial Sequence: Syntheticoligonucleotide
  source 1..37: mol_type = other DNA
attgctccttacgaggagacagtgtagtacaagagat

SEQ ID NO: 1613 - DNA, 37 bp, synthetic construct
  misc_feature 1..37: note = Description of Artificial Sequence: Syntheticoligonucleotide
  source 1..37: mol_type = other DNA
attgctccttacgaggagactactacactgaattcac

SEQ ID NO: 1614 - DNA, 37 bp, synthetic construct
  misc_feature 1..37: note = Description of Artificial Sequence: Syntheticoligonucleotide
  source 1..37: mol_type = other DNA
attgctccttacgaggagacagtgggggtgaattcag

SEQ ID NO: 1615 - DNA, 37 bp, synthetic construct
  misc_feature 1..37: note = Description of Artificial Sequence: Syntheticoligonucleotide
  source 1..37: mol_type = other DNA
attgctccttacgaggagaccagtgggggtgaattca

SEQ ID NO: 1616 - DNA, 37 bp, synthetic construct
  misc_feature 1..37: note = Description of Artificial Sequence: Syntheticoligonucleotide
  source 1..37: mol_type = other DNA
attgctccttacgaggagactcagtgggggtgaattc

SEQ ID NO: 1617 - DNA, 37 bp, synthetic construct
  misc_feature 1..37: note = Description of Artificial Sequence: Syntheticoligonucleotide
  source 1..37: mol_type = other DNA
attgctccttacgaggagacttcagtgggggtgaatt

SEQ ID NO: 1618 - DNA, 37 bp, synthetic construct
  misc_feature 1..37: note = Description of Artificial Sequence: Syntheticoligonucleotide
  source 1..37: mol_type = other DNA
attgctccttacgaggagacacccccactgaaaaaga

SEQ ID NO: 1619 - DNA, 37 bp, synthetic construct
  misc_feature 1..37: note = Description of Artificial Sequence: Syntheticoligonucleotide
  source 1..37: mol_type = other DNA
attgctccttacgaggagacacacggcaggcatactc

SEQ ID NO: 1620 - DNA, 37 bp, synthetic construct
  misc_feature 1..37: note = Description of Artificial Sequence: Syntheticoligonucleotide
  source 1..37: mol_type = other DNA
attgctccttacgaggagacggctgtgacaaagtcac

SEQ ID NO: 1621 - DNA, 37 bp, synthetic construct
  misc_feature 1..37: note = Description of Artificial Sequence: Syntheticoligonucleotide
  source 1..37: mol_type = other DNA
attgctccttacgaggagacgtcacagcccaagatag

SEQ ID NO: 1622 - DNA, 37 bp, synthetic construct
  misc_feature 1..37: note = Description of Artificial Sequence: Syntheticoligonucleotide
  source 1..37: mol_type = other DNA
attgctccttacgaggagactcacagcccaagatagt

SEQ ID NO: 1623 - DNA, 37 bp, synthetic construct
  misc_feature 1..37: note = Description of Artificial Sequence: Syntheticoligonucleotide
  source 1..37: mol_type = other DNA
attgctccttacgaggagacactatcttgggctgtga

SEQ ID NO: 1624 - DNA, 37 bp, synthetic construct
  misc_feature 1..37: note = Description of Artificial Sequence: Syntheticoligonucleotide
  source 1..37: mol_type = other DNA
attgctccttacgaggagacccccacttaactatctt

SEQ ID NO: 1625 - RNA, 37 nt, synthetic construct
  misc_feature 1..37: note = Description of Artificial Sequence: Syntheticoligonucleotide
  source 1..37: mol_type = other RNA
attgctccttacgaggagacccttccgctcacctccg

SEQ ID NO: 1626 - RNA, 37 nt, synthetic construct; identical to SEQ ID NO: 1625
  misc_feature 1..37: note = Description of Artificial Sequence: Syntheticoligonucleotide
  source 1..37: mol_type = other RNA

SEQ ID NO: 1627 - RNA, 37 nt, synthetic construct
  misc_feature 1..37: note = Description of Artificial Sequence: Syntheticoligonucleotide
  source 1..37: mol_type = other RNA
attgctccttacgaggagaccgctcacctccgcctga

SEQ ID NO: 1628 - RNA, 37 nt, synthetic construct
  misc_feature 1..37: note = Description of Artificial Sequence: Syntheticoligonucleotide
  source 1..37: mol_type = other RNA
attgctccttacgaggagactccactgctcaggcgga

SEQ ID NO: 1629 - RNA, 37 nt, synthetic construct
  misc_feature 1..37: note = Description of Artificial Sequence: Syntheticoligonucleotide
  source 1..37: mol_type = other RNA
attgctccttacgaggagactagcaccgcccagacga

SEQ ID NO: 1630 - RNA, 37 nt, synthetic construct
  misc_feature 1..37: note = Description of Artificial Sequence: Syntheticoligonucleotide
  source 1..37: mol_type = other RNA
attgctccttacgaggagacaggcatgcagatcccac

SEQ ID NO: 1631 - RNA, 37 nt, synthetic construct
  misc_feature 1..37: note = Description of Artificial Sequence: Syntheticoligonucleotide
  source 1..37: mol_type = other RNA
attgctccttacgaggagaccacaggcgccctggcca

SEQ ID NO: 1632 - RNA, 37 nt, synthetic construct
  misc_feature 1..37: note = Description of Artificial Sequence: Syntheticoligonucleotide
  source 1..37: mol_type = other RNA
attgctccttacgaggagactctgggcggtgctacaa

SEQ ID NO: 1633 - RNA, 37 nt, synthetic construct
  misc_feature 1..37: note = Description of Artificial Sequence: Syntheticoligonucleotide
  source 1..37: mol_type = other RNA
attgctccttacgaggagacgcatgcctggagcagcc

SEQ ID NO: 1634 - RNA, 37 nt, synthetic construct; identical to SEQ ID NO: 1629
  misc_feature 1..37: note = Description of Artificial Sequence: Syntheticoligonucleotide
  source 1..37: mol_type = other RNA

SEQ ID NO: 1635 - RNA, 37 nt, synthetic construct
  misc_feature 1..37: note = Description of Artificial Sequence: Syntheticoligonucleotide
  source 1..37: mol_type = other RNA
attgctccttacgaggagactggccgccagcccagtt

SEQ ID NO: 1636 - RNA, 37 nt, synthetic construct
  misc_feature 1..37: note = Description of Artificial Sequence: Syntheticoligonucleotide
  source 1..37: mol_type = other RNA
attgctccttacgaggagaccttccgctcacctccgc

SEQ ID NO: 1637 - RNA, 37 nt, synthetic construct
  misc_feature 1..37: note = Description of Artificial Sequence: Syntheticoligonucleotide
  source 1..37: mol_type = other RNA
attgctccttacgaggagaccagggcctgtctgggga

SEQ ID NO: 1638 - RNA, 37 nt, synthetic construct
  misc_feature 1..37: note = Description of Artificial Sequence: Syntheticoligonucleotide
  source 1..37: mol_type = other RNA
attgctccttacgaggagactccccagccctgctcgt

SEQ ID NO: 1639 - RNA, 37 nt, synthetic construct
  misc_feature 1..37: note = Description of Artificial Sequence: Syntheticoligonucleotide
  source 1..37: mol_type = other RNA
attgctccttacgaggagacggtcaccacgagcaggg

SEQ ID NO: 1640 - RNA, 37 nt, synthetic construct
  misc_feature 1..37: note = Description of Artificial Sequence: Syntheticoligonucleotide
  source 1..37: mol_type = other RNA
attgctccttacgaggagactccccttcggtcaccac

SEQ ID NO: 1641 - RNA, 37 nt, synthetic construct
  misc_feature 1..37: note = Description of Artificial Sequence: Syntheticoligonucleotide
  source 1..37: mol_type = other RNA
attgctccttacgaggagacgagaagctgcaggtgaa

SEQ ID NO: 1642 - RNA, 37 nt, synthetic construct
  misc_feature 1..37: note = Description of Artificial Sequence: Syntheticoligonucleotide
  source 1..37: mol_type = other RNA
attgctccttacgaggagacacctgcagcttctccaa

SEQ ID NO: 1643 - RNA, 37 nt, synthetic construct
  misc_feature 1..37: note = Description of Artificial Sequence: Syntheticoligonucleotide
  source 1..37: mol_type = other RNA
attgctccttacgaggagactccaacacatcggagag

SEQ ID NO: 1644 - RNA, 37 nt, synthetic construct
  misc_feature 1..37: note = Description of Artificial Sequence: Syntheticoligonucleotide
  source 1..37: mol_type = other RNA
attgctccttacgaggagacgcacgaagctctccgat

SEQ ID NO: 1645 - RNA, 37 nt, synthetic construct
  misc_feature 1..37: note = Description of Artificial Sequence: Syntheticoligonucleotide
  source 1..37: mol_type = other RNA
attgctccttacgaggagacagcacgaagctctccga

SEQ ID NO: 1646 - RNA, 37 nt, synthetic construct
  misc_feature 1..37: note = Description of Artificial Sequence: Syntheticoligonucleotide
  source 1..37: mol_type = other RNA
attgctccttacgaggagacgtgctaaactggtaccg

SEQ ID NO: 1647 - RNA, 37 nt, synthetic construct
  misc_feature 1..37: note = Description of Artificial Sequence: Syntheticoligonucleotide
  source 1..37: mol_type = other RNA
attgctccttacgaggagacctggggctcatgcggta

SEQ ID NO: 1648 - RNA, 37 nt, synthetic construct
  misc_feature 1..37: note = Description of Artificial Sequence: Syntheticoligonucleotide
  source 1..37: mol_type = other RNA
attgctccttacgaggagactccgtctggttgctggg

SEQ ID NO: 1649 - RNA, 37 nt, synthetic construct
  misc_feature 1..37: note = Description of Artificial Sequence: Syntheticoligonucleotide
  source 1..37: mol_type = other RNA
attgctccttacgaggagaccccgaggaccgcagcca

SEQ ID NO: 1650 - RNA, 37 nt, synthetic construct
  misc_feature 1..37: note = Description of Artificial Sequence: Syntheticoligonucleotide
  source 1..37: mol_type = other RNA
attgctccttacgaggagactgtgacacggaagcggc

SEQ ID NO: 1651 - RNA, 37 nt, synthetic construct
  misc_feature 1..37: note = Description of Artificial Sequence: Syntheticoligonucleotide
  source 1..37: mol_type = other RNA
attgctccttacgaggagaccgtgtcacacaactgcc

SEQ ID NO: 1652 - RNA, 37 nt, synthetic construct
  misc_feature 1..37: note = Description of Artificial Sequence: Syntheticoligonucleotide
  source 1..37: mol_type = other RNA
attgctccttacgaggagacggcagttgtgtgacacg

SEQ ID NO: 1653 - RNA, 37 nt, synthetic construct
  misc_feature 1..37: note = Description of Artificial Sequence: Syntheticoligonucleotide
  source 1..37: mol_type = other RNA
attgctccttacgaggagaccacatgagcgtggtcag

SEQ ID NO: 1654 - RNA, 37 nt, synthetic construct
  misc_feature 1..37: note = Description of Artificial Sequence: Syntheticoligonucleotide
  source 1..37: mol_type = other RNA
attgctccttacgaggagaccgccgggccctgaccac

SEQ ID NO: 1655 - RNA, 37 nt, synthetic construct
  misc_feature 1..37: note = Description of Artificial Sequence: Syntheticoligonucleotide
  source 1..37: mol_type = other RNA
attgctccttacgaggagacggggccagggagatggc

SEQ ID NO: 1656 - RNA, 37 nt, synthetic construct
  misc_feature 1..37: note = Description of Artificial Sequence: Syntheticoligonucleotide
  source 1..37: mol_type = other RNA
attgctccttacgaggagacatctgcgccttgggggc

SEQ ID NO: 1657 - RNA, 37 nt, synthetic construct
  misc_feature 1..37: note = Description of Artificial Sequence: Syntheticoligonucleotide
  source 1..37: mol_type = other RNA
attgctccttacgaggagacgatctgcgccttggggg

SEQ ID NO: 1658 - RNA, 37 nt, synthetic construct
  misc_feature 1..37: note = Description of Artificial Sequence: Syntheticoligonucleotide
  source 1..37: mol_type = other RNA
attgctccttacgaggagacccagacaggccctggaa

SEQ ID NO: 1659 - RNA, 37 nt, synthetic construct
  misc_feature 1..37: note = Description of Artificial Sequence: Syntheticoligonucleotide
  source 1..37: mol_type = other RNA
attgctccttacgaggagacccagccctgctcgtggt

SEQ ID NO: 1660 - RNA, 37 nt, synthetic construct
  misc_feature 1..37: note = Description of Artificial Sequence: Syntheticoligonucleotide
  source 1..37: mol_type = other RNA
attgctccttacgaggagactctctggaagggcacaa

SEQ ID NO: 1661 - RNA, 37 nt, synthetic construct
  misc_feature 1..37: note = Description of Artificial Sequence: Syntheticoligonucleotide
  source 1..37: mol_type = other RNA
attgctccttacgaggagacgtgcccttccagagaga

SEQ ID NO: 1662 - RNA, 37 nt, synthetic construct
  misc_feature 1..37: note = Description of Artificial Sequence: Syntheticoligonucleotide
  source 1..37: mol_type = other RNA
attgctccttacgaggagactgcccttccagagagaa

SEQ ID NO: 1663 - RNA, 37 nt, synthetic construct
  misc_feature 1..37: note = Description of Artificial Sequence: Syntheticoligonucleotide
  source 1..37: mol_type = other RNA
attgctccttacgaggagactgcccttctctctggaa

SEQ ID NO: 1664 - RNA, 37 nt, synthetic construct
  misc_feature 1..37: note = Description of Artificial Sequence: Syntheticoligonucleotide
  source 1..37: mol_type = other RNA
attgctccttacgaggagaccagagagaagggcagaa

SEQ ID NO: 1665 - RNA, 37 nt, synthetic construct
  misc_feature 1..37: note = Description of Artificial Sequence: Syntheticoligonucleotide
  source 1..37: mol_type = other RNA
attgctccttacgaggagacgaactggccggctggcc

SEQ ID NO: 1666 - RNA, 37 nt, synthetic construct
  misc_feature 1..37: note = Description of Artificial Sequence: Syntheticoligonucleotide
  source 1..37: mol_type = other RNA
attgctccttacgaggagacggaactggccggctggc

SEQ ID NO: 1667 - RNA, 37 nt, synthetic construct
  misc_feature 1..37: note = Description of Artificial Sequence: Syntheticoligonucleotide
  source 1..37: mol_type = other RNA
attgctccttacgaggagaccaaaccctggtggttgg

SEQ ID NO: 1668 - RNA, 37 nt, synthetic construct
  misc_feature 1..37: note = Description of Artificial Sequence: Syntheticoligonucleotide
  source 1..37: mol_type = other RNA
attgctccttacgaggagacgtgtcgtgggcggcctg

SEQ ID NO: 1669 - RNA, 37 nt, synthetic construct
  misc_feature 1..37: note = Description of Artificial Sequence: Syntheticoligonucleotide
  source 1..37: mol_type = other RNA
attgctccttacgaggagaccctcgtgcggcccggga

SEQ ID NO: 1670 - RNA, 37 nt, synthetic construct
  misc_feature 1..37: note = Description of Artificial Sequence: Syntheticoligonucleotide
  source 1..37: mol_type = other RNA
attgctccttacgaggagactccctgcagagaaacac

SEQ ID NO: 1671 - RNA, 37 nt, synthetic construct
  misc_feature 1..37: note = Description of Artificial Sequence: Syntheticoligonucleotide
  source 1..37: mol_type = other RNA
attgctccttacgaggagacctctgcagggacaatag

SEQ ID NO: 1672 - RNA, 37 nt, synthetic construct
  misc_feature 1..37: note = Description of Artificial Sequence: Syntheticoligonucleotide
  source 1..37: mol_type = other RNA
attgctccttacgaggagactctgcagggacaatagg

SEQ ID NO: 1673 - RNA, 37 nt, synthetic construct
  misc_feature 1..37: note = Description of Artificial Sequence: Syntheticoligonucleotide
  source 1..37: mol_type = other RNA
attgctccttacgaggagacctcctcaaagaaggagg

SEQ ID NO: 1674 - RNA, 37 nt, synthetic construct
  misc_feature 1..37: note = Description of Artificial Sequence: Syntheticoligonucleotide
  source 1..37: mol_type = other RNA
attgctccttacgaggagactcctcaaagaaggagga

SEQ ID NO: 1675 - RNA, 37 nt, synthetic construct
  misc_feature 1..37: note = Description of Artificial Sequence: Syntheticoligonucleotide
  source 1..37: mol_type = other RNA
attgctccttacgaggagactctgtggactatgggga

SEQ ID NO: 1676 - RNA, 37 nt, synthetic construct
  misc_feature 1..37: note = Description of Artificial Sequence: Syntheticoligonucleotide
  source 1..37: mol_type = other RNA
attgctccttacgaggagactctcgccactggaaatc

SEQ ID NO: 1677 - RNA, 37 nt, synthetic construct
  misc_feature 1..37: note = Description of Artificial Sequence: Syntheticoligonucleotide
  source 1..37: mol_type = other RNA
attgctccttacgaggagacccagtggcgagagaaga

SEQ ID NO: 1678 - RNA, 37 nt, synthetic construct
  misc_feature 1..37: note = Description of Artificial Sequence: Syntheticoligonucleotide
  source 1..37: mol_type = other RNA
attgctccttacgaggagaccagtggcgagagaagac

SEQ ID NO: 1679 - RNA, 37 nt, synthetic construct
  misc_feature 1..37: note = Description of Artificial Sequence: Syntheticoligonucleotide
  source 1..37: mol_type = other RNA
attgctccttacgaggagaccgctaggaaagacaatg

SEQ ID NO: 1680 - RNA, 37 nt, synthetic construct
  misc_feature 1..37: note = Description of Artificial Sequence: Syntheticoligonucleotide
  source 1..37: mol_type = other RNA
attgctccttacgaggagactctttcctagcggaatg

SEQ ID NO: 1681 - RNA, 37 nt, synthetic construct
  misc_feature 1..37: note = Description of Artificial Sequence: Syntheticoligonucleotide
  source 1..37: mol_type = other RNA
attgctccttacgaggagaccctagcggaatgggcac

SEQ ID NO: 1682 - RNA, 37 nt, synthetic construct
  misc_feature 1..37: note = Description of Artificial Sequence: Syntheticoligonucleotide
  source 1..37: mol_type = other RNA
attgctccttacgaggagacctagcggaatgggcacc

SEQ ID NO: 1683 - RNA, 37 nt, synthetic construct
  misc_feature 1..37: note = Description of Artificial Sequence: Syntheticoligonucleotide
  source 1..37: mol_type = other RNA
attgctccttacgaggagacgcccctctgaccggctt

SEQ ID NO: 1684 - RNA, 37 nt, synthetic construct
  misc_feature 1..37: note = Description of Artificial Sequence: Syntheticoligonucleotide
  source 1..37: mol_type = other RNA
attgctccttacgaggagaccttggccaccagtgttc

SEQ ID NO: 1685 - RNA, 37 nt, synthetic construct
  misc_feature 1..37: note = Description of Artificial Sequence: Syntheticoligonucleotide
  source 1..37: mol_type = other RNA
attgctccttacgaggagacgccaccagtgttctgca

SEQ ID NO: 1686 - RNA, 37 nt, synthetic construct
  misc_feature 1..37: note = Description of Artificial Sequence: Syntheticoligonucleotide
  source 1..37: mol_type = other RNA
attgctccttacgaggagactgcagaccctccaccat

SEQ ID NO: 1687 - RNA, 37 nt, synthetic construct
  misc_feature 1..37: note = Description of Artificial Sequence: Syntheticoligonucleotide
  source 1..37: mol_type = other RNA
attgctccttacgaggagactcctgaggaaatgcgct

SEQ ID NO: 1688 - RNA, 37 nt, synthetic construct
  misc_feature 1..37: note = Description of Artificial Sequence: Syntheticoligonucleotide
  source 1..37: mol_type = other RNA
attgctccttacgaggagaccctcaggagaagcaggc

SEQ ID NO: 1689 - RNA, 37 nt, synthetic construct
  misc_feature 1..37: note = Description of Artificial Sequence: Syntheticoligonucleotide
  source 1..37: mol_type = other RNA
attgctccttacgaggagacctcaggagaagcaggca

SEQ ID NO: 1690 - RNA, 37 nt, synthetic construct
  misc_feature 1..37: note = Description of Artificial Sequence: Syntheticoligonucleotide
  source 1..37: mol_type = other RNA
attgctccttacgaggagaccaggccgtccaggggct

SEQ ID NO: 1691 - RNA, 37 nt, synthetic construct
  misc_feature 1..37: note = Description of Artificial Sequence: Syntheticoligonucleotide
  source 1..37: mol_type = other RNA
attgctccttacgaggagacagacatgagtcctgtgg

SEQ ID NO: 1692 - RNA, 37 nt, synthetic construct
  misc_feature 1..37: note = Description of Artificial Sequence: Syntheticoligonucleotide
  source 1..37: mol_type = other RNA
attgctccttacgaggagacaggtcctgccagcacag

SEQ ID NO: 1693 - RNA, 37 nt, synthetic construct
  misc_feature 1..37: note = Description of Artificial Sequence: Syntheticoligonucleotide
  source 1..37: mol_type = other RNA
attgctccttacgaggagacagggagctggacgcagg

SEQ ID NO: 1694 - RNA, 37 nt, synthetic construct
  misc_feature 1..37: note = Description of Artificial Sequence: Syntheticoligonucleotide
  source 1..37: mol_type = other RNA
attgctccttacgaggagacagccccgggccgcaggc

SEQ ID NO: 1695 - RNA, 37 nt, synthetic construct
  misc_feature 1..37: note = Description of Artificial Sequence: Syntheticoligonucleotide
  source 1..37: mol_type = other RNA
attgctccttacgaggagacaggcaggaggctccggg

SEQ ID NO: 1696 - RNA, 37 nt, synthetic construct
  misc_feature 1..37: note = Description of Artificial Sequence: Syntheticoligonucleotide
  source 1..37: mol_type = other RNA
attgctccttacgaggagacggggctggttggagatg

SEQ ID NO: 1697 - RNA, 37 nt, synthetic construct
  misc_feature 1..37: note = Description of Artificial Sequence: Syntheticoligonucleotide
  source 1..37: mol_type = other RNA
attgctccttacgaggagacgagatggccttggagca

SEQ ID NO: 1698 - RNA, 37 nt, synthetic construct
  misc_feature 1..37: note = Description of Artificial Sequence: Syntheticoligonucleotide
  source 1..37: mol_type = other RNA
attgctccttacgaggagacgctgctccaaggccatc

SEQ ID NO: 1699 - RNA, 37 nt, synthetic construct
  misc_feature 1..37: note = Description of Artificial Sequence: Syntheticoligonucleotide
  source 1..37: mol_type = other RNA
attgctccttacgaggagacgagcagccaaggtgccc

SEQ ID NO: 1700 - RNA, 37 nt, synthetic construct
  misc_feature 1..37: note = Description of Artificial Sequence: Syntheticoligonucleotide
  source 1..37: mol_type = other RNA
attgctccttacgaggagacgggatgccactgccagg

SEQ ID NO: 1701 - RNA, 37 nt, synthetic construct
  misc_feature 1..37: note = Description of Artificial Sequence: Syntheticoligonucleotide
  source 1..37: mol_type = other RNA
attgctccttacgaggagaccgggatgccactgccag

SEQ ID NO: 1702 - RNA, 37 nt, synthetic construct
  misc_feature 1..37: note = Description of Artificial Sequence: Syntheticoligonucleotide
  source 1..37: mol_type = other RNA
attgctccttacgaggagacggccctgcgtccagggc

SEQ ID NO: 1703 - RNA, 37 nt, synthetic construct
  misc_feature 1..37: note = Description of Artificial Sequence: Syntheticoligonucleotide
  source 1..37: mol_type = other RNA
attgctccttacgaggagactctgctccctgcaggcc

SEQ ID NO: 1704 - RNA, 37 nt, synthetic construct
  misc_feature 1..37: note = Description of Artificial Sequence: Syntheticoligonucleotide
  source 1..37: mol_type = other RNA
attgctccttacgaggagactctaggcctgcagggag

SEQ ID NO: 1705 - RNA, 37 nt, synthetic construct
  misc_feature 1..37: note = Description of Artificial Sequence: Syntheticoligonucleotide
  source 1..37: mol_type = other RNA
attgctccttacgaggagaccctgaaacttctctagg

SEQ ID NO: 1706 - RNA, 37 nt, synthetic construct
  misc_feature 1..37: note = Description of Artificial Sequence: Syntheticoligonucleotide
  source 1..37: mol_type = other RNA
attgctccttacgaggagactgaccttccctgaaact

SEQ ID NO: 1707 - RNA, 37 nt, synthetic construct
  misc_feature 1..37: note = Description of Artificial Sequence: Syntheticoligonucleotide
  source 1..37: mol_type = other RNA
attgctccttacgaggagaccagggaaggtcagaaga

SEQ ID NO: 1708 - RNA, 37 nt, synthetic construct
  misc_feature 1..37: note = Description of Artificial Sequence: Syntheticoligonucleotide
  source 1..37: mol_type = other RNA
attgctccttacgaggagacagggaaggtcagaagag

SEQ ID NO: 1709 - RNA, 37 nt, synthetic construct
  misc_feature 1..37: note = Description of Artificial Sequence: Syntheticoligonucleotide
  source 1..37: mol_type = other RNA
attgctccttacgaggagacctgccctgcccaccaca

SEQ ID NO: 1710 - RNA, 37 nt, synthetic construct
  misc_feature 1..37: note = Description of Artificial Sequence: Syntheticoligonucleotide
  source 1..37: mol_type = other RNA
attgctccttacgaggagaccctgccctgcccaccac

SEQ ID NO: 1711 - RNA, 37 nt, synthetic construct
  misc_feature 1..37: note = Description of Artificial Sequence: Syntheticoligonucleotide
  source 1..37: mol_type = other RNA
attgctccttacgaggagacacacatgcccaggcagc

SEQ ID NO: 1712 - RNA, 37 nt, synthetic construct
  misc_feature 1..37: note = Description of Artificial Sequence: Syntheticoligonucleotide
  source 1..37: mol_type = other RNA
attgctccttacgaggagaccacatgcccaggcagca

SEQ ID NO: 1713 - RNA, 37 nt, synthetic construct
  misc_feature 1..37: note = Description of Artificial Sequence: Syntheticoligonucleotide
  source 1..37: mol_type = other RNA
attgctccttacgaggagaccctgccccacaaagggc

SEQ ID NO: 1714 - RNA, 37 nt, synthetic construct
  misc_feature 1..37: note = Description of Artificial Sequence: Syntheticoligonucleotide
  source 1..37: mol_type = other RNA
attgctccttacgaggagacgtggggcagggaagctg

SEQ ID NO: 1715 - RNA, 37 nt, synthetic construct
  misc_feature 1..37: note = Description of Artificial Sequence: Syntheticoligonucleotide
  source 1..37: mol_type = other RNA
attgctccttacgaggagactggggcagggaagctga

SEQ ID NO: 1716 - RNA, 37 nt, synthetic construct
  misc_feature 1..37: note = Description of Artificial Sequence: Syntheticoligonucleotide
  source 1..37: mol_type = other RNA
attgctccttacgaggagacctgcctcagcttccctg

SEQ ID NO: 1717 - RNA, 37 nt, synthetic construct
  misc_feature 1..37: note = Description of Artificial Sequence: Syntheticoligonucleotide
  source 1..37: mol_type = other RNA
attgctccttacgaggagaccaggcccagccagcact

SEQ ID NO: 1718 - RNA, 37 nt, synthetic construct
  misc_feature 1..37: note = Description of Artificial Sequence: Syntheticoligonucleotide
  source 1..37: mol_type = other RNA
attgctccttacgaggagacaggcccagccagcactc

SEQ ID NO: 1719 - RNA, 37 nt, synthetic construct
  misc_feature 1..37: note = Description of Artificial Sequence: Syntheticoligonucleotide
  source 1..37: mol_type = other RNA
attgctccttacgaggagaccaccccagcccctcaca

SEQ ID NO: 1720 - RNA, 37 nt, synthetic construct
  misc_feature 1..37: note = Description of Artificial Sequence: Syntheticoligonucleotide
  source 1..37: mol_type = other RNA
attgctccttacgaggagacggaccgtaggatgtccc

SEQ ID NO: 1721 - RNA, 37 nt, synthetic construct
  misc_feature 1..37: note = Description of Artificial Sequence: Syntheticoligonucleotide
  source 1..37: mol_type = other RNA
attgctccttacgaggagacctacacaatgcgttgcc

SEQ ID NO: 1722 - RNA, 37 nt, synthetic construct
  misc_feature 1..37: note = Description of Artificial Sequence: Syntheticoligonucleotide
  source 1..37: mol_type = other RNA
attgctccttacgaggagacgggctctgacaggtagg

SEQ ID NO: 1723 - RNA, 37 nt, synthetic construct
  misc_feature 1..37: note = Description of Artificial Sequence: Syntheticoligonucleotide
  source 1..37: mol_type = other RNA
attgctccttacgaggagactgtaggaatcccagcca

SEQ ID NO: 1724 - RNA, 37 nt, synthetic construct
  misc_feature 1..37: note = Description of Artificial Sequence: Syntheticoligonucleotide
  source 1..37: mol_type = other RNA
attgctccttacgaggagaccctggctccacgccctg

SEQ ID NO: 1725 - RNA, 37 nt, synthetic construct
  misc_feature 1..37: note = Description of Artificial Sequence: Syntheticoligonucleotide
  source 1..37: mol_type = other RNA
attgctccttacgaggagacgggaagctgagggcacg

SEQ ID NO: 1726 - RNA, 37 nt, synthetic construct
  misc_feature 1..37: note = Description of Artificial Sequence: Syntheticoligonucleotide
  source 1..37: mol_type = other RNA
attgctccttacgaggagacacagcgatgctgacccc

SEQ ID NO: 1727 - RNA, 37 nt, synthetic construct
  misc_feature 1..37: note = Description of Artificial Sequence: Syntheticoligonucleotide
  source 1..37: mol_type = other RNA
attgctccttacgaggagacttaacagcgatgctgac

SEQ ID NO: 1728 - RNA, 37 nt, synthetic construct
  misc_feature 1..37: note = Description of Artificial Sequence: Syntheticoligonucleotide
  source 1..37: mol_type = other RNA
attgctccttacgaggagactatgaccagatggacct

SEQ ID NO: 1729 - RNA, 37 nt, synthetic construct
  misc_feature 1..37: note = Description of Artificial Sequence: Syntheticoligonucleotide
  source 1..37: mol_type = other RNA
attgctccttacgaggagacgggcccctagaaggtgg

SEQ ID NO: 1730 - RNA, 37 nt, synthetic construct
  misc_feature 1..37: note = Description of Artificial Sequence: Syntheticoligonucleotide
  source 1..37: mol_type = other RNA
attgctccttacgaggagactaggggccccaactcca

SEQ ID NO: 1731 - RNA, 37 nt, synthetic construct
  misc_feature 1..37: note = Description of Artificial Sequence: Syntheticoligonucleotide
  source 1..37: mol_type = other RNA
attgctccttacgaggagacagaagctccaggtagcc

SEQ ID NO: 1732 - RNA, 37 nt, synthetic construct
  misc_feature 1..37: note = Description of Artificial Sequence: Syntheticoligonucleotide
  source 1..37: mol_type = other RNA
attgctccttacgaggagactccagccaggtccatct

SEQ ID NO: 1733 - RNA, 37 nt, synthetic construct
  misc_feature 1..37: note = Description of Artificial Sequence: Syntheticoligonucleotide
  source 1..37: mol_type = other RNA
attgctccttacgaggagacttctccagccaggtcca

SEQ ID NO: 1734 - RNA, 37 nt, synthetic construct
  misc_feature 1..37: note = Description of Artificial Sequence: Syntheticoligonucleotide
  source 1..37: mol_type = other RNA
attgctccttacgaggagacccgctgttgccgccgct

SEQ ID NO: 1735 - RNA, 37 nt, synthetic construct
  misc_feature 1..37: note = Description of Artificial Sequence: Syntheticoligonucleotide
  source 1..37: mol_type = other RNA
attgctccttacgaggagacccgccgctgctgctgct

SEQ ID NO: 1736 - RNA, 37 nt, synthetic construct
  misc_feature 1..37: note = Description of Artificial Sequence: Syntheticoligonucleotide
  source 1..37: mol_type = other RNA
attgctccttacgaggagacctgctactgtgccccac

SEQ ID NO: 1737 - RNA, 37 nt, synthetic construct
  misc_feature 1..37: note = Description of Artificial Sequence: Syntheticoligonucleotide
  source 1..37: mol_type = other RNA
attgctccttacgaggagacataatctccatcctcgt

SEQ ID NO: 1738 - RNA, 37 nt, synthetic construct
  misc_feature 1..37: note = Description of Artificial Sequence: Syntheticoligonucleotide
  source 1..37: mol_type = other RNA
attgctccttacgaggagactgaagagctgatgctcg

SEQ ID NO: 1739 - RNA, 37 nt, synthetic construct
  misc_feature 1..37: note = Description of Artificial Sequence: Syntheticoligonucleotide
  source 1..37: mol_type = other RNA
attgctccttacgaggagacgagcaacggcggaaggt

SEQ ID NO: 1740 - RNA, 37 nt, synthetic construct
  misc_feature 1..37: note = Description of Artificial Sequence: Syntheticoligonucleotide
  source 1..37: mol_type = other RNA
attgctccttacgaggagacctggcagcctccaggcc

SEQ ID NO: 1741 - RNA, 37 nt, synthetic construct
  misc_feature 1..37: note = Description of Artificial Sequence: Syntheticoligonucleotide
  source 1..37: mol_type = other RNA
attgctccttacgaggagactggtgctgatggaggag

SEQ ID NO: 1742 - RNA, 37 nt, synthetic construct
  misc_feature 1..37: note = Description of Artificial Sequence: Syntheticoligonucleotide
  source 1..37: mol_type = other RNA
attgctccttacgaggagacaatctgtagcctctggg

SEQ ID NO: 1743 - RNA, 37 nt, synthetic construct
  misc_feature 1..37: note = Description of Artificial Sequence: Syntheticoligonucleotide
  source 1..37: mol_type = other RNA
attgctccttacgaggagacttcaatctgtagcctct

SEQ ID NO: 1744 - RNA, 37 nt, synthetic construct
  misc_feature 1..37: note = Description of Artificial Sequence: Syntheticoligonucleotide
  source 1..37: mol_type = other RNA
attgctccttacgaggagacgttcaatctgtagcctc

SEQ ID NO: 1745 - RNA, 37 nt, synthetic construct
  misc_feature 1..37: note = Description of Artificial Sequence: Syntheticoligonucleotide
  source 1..37: mol_type = other RNA
attgctccttacgaggagacaacaaactgcccaccgc

SEQ ID NO: 1746 - RNA, 37 nt, synthetic construct
  misc_feature 1..37: note = Description of Artificial Sequence: Syntheticoligonucleotide
  source 1..37: mol_type = other RNA
attgctccttacgaggagacatgacatagccccggcg

SEQ ID NO: 1747 - RNA, 37 nt, synthetic construct
  misc_feature 1..37: note = Description of Artificial Sequence: Syntheticoligonucleotide
  source 1..37: mol_type = other RNA
attgctccttacgaggagactacatatcttttatgac

SEQ ID NO: 1748 - RNA, 37 nt, synthetic construct
  misc_feature 1..37: note = Description of Artificial Sequence: Syntheticoligonucleotide
  source 1..37: mol_type = other RNA
attgctccttacgaggagactatgacctcttccctgg

SEQ ID NO: 1749 - RNA, 37 nt, synthetic construct
  misc_feature 1..37: note = Description of Artificial Sequence: Syntheticoligonucleotide
  source 1..37: mol_type = other RNA
attgctccttacgaggagacatgacctcttccctggc

SEQ ID NO: 1750 - RNA, 37 nt, synthetic construct
  misc_feature 1..37: note = Description of Artificial Sequence: Syntheticoligonucleotide
  source 1..37: mol_type = other RNA
attgctccttacgaggagactgacctcttccctggct

SEQ ID NO: 1751 - RNA, 37 nt, synthetic construct
  misc_feature 1..37: note = Description of Artificial Sequence: Syntheticoligonucleotide
  source 1..37: mol_type = other RNA
attgctccttacgaggagacaccaagaagccagggaa

SEQ ID NO: 1752 - RNA, 37 nt, synthetic construct
  misc_feature 1..37: note = Description of Artificial Sequence: Syntheticoligonucleotide
  source 1..37: mol_type = other RNA
attgctccttacgaggagaccctggcttcttggtgaa

SEQ ID NO: 1753 - RNA, 37 nt, synthetic construct
  misc_feature 1..37: note = Description of Artificial Sequence: Syntheticoligonucleotide
  source 1..37: mol_type = other RNA
attgctccttacgaggagacttggtgaagatgagcag

SEQ ID NO: 1754 - RNA, 37 nt, synthetic construct
  misc_feature 1..37: note = Description of Artificial Sequence: Syntheticoligonucleotide
  source 1..37: mol_type = other RNA
attgctccttacgaggagacgtgaagatgagcagtga

SEQ ID NO: 1755 - RNA, 37 nt, synthetic construct
  misc_feature 1..37: note = Description of Artificial Sequence: Syntheticoligonucleotide
  source 1..37: mol_type = other RNA
attgctccttacgaggagacccccatgtggagtacat

SEQ ID NO: 1756 - RNA, 37 nt, synthetic construct
  misc_feature 1..37: note = Description of Artificial Sequence: Syntheticoligonucleotide
  source 1..37: mol_type = other RNA
attgctccttacgaggagacctcaatgtactccacat

SEQ ID NO: 1757 - RNA, 37 nt, synthetic construct
  misc_feature 1..37: note = Description of Artificial Sequence: Syntheticoligonucleotide
  source 1..37: mol_type = other RNA
attgctccttacgaggagacaggaagactcctttgtc

SEQ ID NO: 1758 - RNA, 37 nt, synthetic construct
  misc_feature 1..37: note = Description of Artificial Sequence: Syntheticoligonucleotide
  source 1..37: mol_type = other RNA
attgctccttacgaggagacgtcttcgcccagagcat

SEQ ID NO: 1759 - RNA, 37 nt, synthetic construct
  misc_feature 1..37: note = Description of Artificial Sequence: Syntheticoligonucleotide
  source 1..37: mol_type = other RNA
attgctccttacgaggagactcttcgcccagagcatc

SEQ ID NO: 1760 - RNA, 37 nt, synthetic construct
  misc_feature 1..37: note = Description of Artificial Sequence: Syntheticoligonucleotide
  source 1..37: mol_type = other RNA
attgctccttacgaggagacgcccagagcatcccatg

SEQ ID NO: 1761 - RNA, 37 nt, synthetic construct
  misc_feature 1..37: note = Description of Artificial Sequence: Syntheticoligonucleotide
  source 1..37: mol_type = other RNA
attgctccttacgaggagaccatgggatgctctgggc

SEQ ID NO: 1762 - RNA, 37 nt, synthetic construct
  misc_feature 1..37: note = Description of Artificial Sequence: Syntheticoligonucleotide
  source 1..37: mol_type = other RNA
attgctccttacgaggagacgctccaggttccatggg

SEQ ID NO: 1763 - RNA, 37 nt, synthetic construct
  misc_feature 1..37: note = Description of Artificial Sequence: Syntheticoligonucleotide
  source 1..37: mol_type = other RNA
attgctccttacgaggagactcccagcatggcaccag

SEQ ID NO: 1764 - RNA, 37 nt, synthetic construct
  misc_feature 1..37: note = Description of Artificial Sequence: Syntheticoligonucleotide
  source 1..37: mol_type = other RNA
attgctccttacgaggagacctctgtctggtgccatg

SEQ ID NO: 1765 - RNA, 37 nt, synthetic construct
  misc_feature 1..37: note = Description of Artificial Sequence: Syntheticoligonucleotide
  source 1..37: mol_type = other RNA
attgctccttacgaggagacgataccagcatccaggg

SEQ ID NO: 1766 - RNA, 37 nt, synthetic construct
  misc_feature 1..37: note = Description of Artificial Sequence: Syntheticoligonucleotide
  source 1..37: mol_type = other RNA
attgctccttacgaggagacagggcagggtcaccatc

SEQ ID NO: 1767 - RNA, 37 nt, synthetic construct
  misc_feature 1..37: note = Description of Artificial Sequence: Syntheticoligonucleotide
  source 1..37: mol_type = other RNA
attgctccttacgaggagacaagtcggtgatggtgac

SEQ ID NO: 1768 - RNA, 37 nt, synthetic construct
  misc_feature 1..37: note = Description of Artificial Sequence: Syntheticoligonucleotide
  source 1..37: mol_type = other RNA
attgctccttacgaggagacaacagcgtgccggagga

SEQ ID NO: 1769 - RNA, 37 nt, synthetic construct
  misc_feature 1..37: note = Description of Artificial Sequence: Syntheticoligonucleotide
  source 1..37: mol_type = other RNA
attgctccttacgaggagacgccacaccagcatcccg

SEQ ID NO: 1770 - RNA, 37 nt, synthetic construct
  misc_feature 1..37: note = Description of Artificial Sequence: Syntheticoligonucleotide
  source 1..37: mol_type = other RNA
attgctccttacgaggagacagcacacgcaggctgtg

SEQ ID NO: 1771 - RNA, 37 nt, synthetic construct
  misc_feature 1..37: note = Description of Artificial Sequence: Syntheticoligonucleotide
  source 1..37: mol_type = other RNA
attgctccttacgaggagacacagttgagcacacgca

SEQ ID NO: 1772 - RNA, 37 nt, synthetic construct
  misc_feature 1..37: note = Description of Artificial Sequence: Syntheticoligonucleotide
  source 1..37: mol_type = other RNA
attgctccttacgaggagacccttgacagttgagcac

SEQ ID NO: 1773 - RNA, 37 nt, synthetic construct
  misc_feature 1..37: note = Description of Artificial Sequence: Syntheticoligonucleotide
  source 1..37: mol_type = other RNA
attgctccttacgaggagacgctgactcttccgaata

SEQ ID NO: 1774 - RNA, 37 nt, synthetic construct
  misc_feature 1..37: note = Description of Artificial Sequence: Syntheticoligonucleotide
  source 1..37: mol_type = other RNA
attgctccttacgaggagacattcggaagagtcagct

SEQ ID NO: 1775 - RNA, 37 nt, synthetic construct
  misc_feature 1..37: note = Description of Artificial Sequence: Syntheticoligonucleotide
  source 1..37: mol_type = other RNA
attgctccttacgaggagacttcggaagagtcagcta

SEQ ID NO: 1776 - RNA, 37 nt, synthetic construct
  misc_feature 1..37: note = Description of Artificial Sequence: Syntheticoligonucleotide
  source 1..37: mol_type = other RNA
attgctccttacgaggagacggaagagtcagctaatc

SEQ ID NO: 1777 - RNA, 37 nt, synthetic construct
  misc_feature 1..37: note = Description of Artificial Sequence: Syntheticoligonucleotide
  source 1..37: mol_type = other RNA
attgctccttacgaggagactgctgcccctggccggt

SEQ ID NO: 1778 - RNA, 37 nt, synthetic construct
  misc_feature 1..37: note = Description of Artificial Sequence: Syntheticoligonucleotide
  source 1..37: mol_type = other RNA
attgctccttacgaggagacaggatgcggctataccc

SEQ ID NO: 1779 - RNA, 37 nt, synthetic construct
  misc_feature 1..37: note = Description of Artificial Sequence: Syntheticoligonucleotide
  source 1..37: mol_type = other RNA
attgctccttacgaggagacccagctgctgcaaccag

SEQ ID NO: 1780 - RNA, 37 nt, synthetic construct
  misc_feature 1..37: note = Description of Artificial Sequence: Syntheticoligonucleotide
  source 1..37: mol_type = other RNA
attgctccttacgaggagaccagcagctgggaacttc

SEQ ID NO: 1781 - RNA, 37 nt, synthetic construct
  misc_feature 1..37: note = Description of Artificial Sequence: Syntheticoligonucleotide
  source 1..37: mol_type = other RNA
attgctccttacgaggagaccgggacgacgcctgcct

SEQ ID NO: 1782 - RNA, 37 nt, synthetic construct
  misc_feature 1..37: note = Description of Artificial Sequence: Syntheticoligonucleotide
  source 1..37: mol_type = other RNA
attgctccttacgaggagacgtggccccgactgtgat

SEQ ID NO: 1783 - RNA, 37 nt, synthetic construct
  misc_feature 1..37: note = Description of Artificial Sequence: Syntheticoligonucleotide
  source 1..37: mol_type = other RNA
attgctccttacgaggagacccttggggactttgggg

SEQ ID NO: 1784 - RNA, 37 nt, synthetic construct
  misc_feature 1..37: note = Description of Artificial Sequence: Syntheticoligonucleotide
  source 1..37: mol_type = other RNA
attgctccttacgaggagacgtccccaaagtccccaa

SEQ ID NO: 1785 - RNA, 37 nt, synthetic construct
  misc_feature 1..37: note = Description of Artificial Sequence: Syntheticoligonucleotide
  source 1..37: mol_type = other RNA
attgctccttacgaggagacgggactttggggactaa

SEQ ID NO: 1786 - RNA, 37 nt, synthetic construct
  misc_feature 1..37: note = Description of Artificial Sequence: Syntheticoligonucleotide
  source 1..37: mol_type = other RNA
attgctccttacgaggagacggggactaattttggac

SEQ ID NO: 1787 - RNA, 37 nt, synthetic construct
  misc_feature 1..37: note = Description of Artificial Sequence: Syntheticoligonucleotide
  source 1..37: mol_type = other RNA
attgctccttacgaggagacgggactaattttggacg

SEQ ID NO: 1788 - RNA, 37 nt, synthetic construct
  misc_feature 1..37: note = Description of Artificial Sequence: Syntheticoligonucleotide
  source 1..37: mol_type = other RNA
attgctccttacgaggagactggacgctgtgtggatc

SEQ ID NO: 1789 - RNA, 37 nt, synthetic construct
  misc_feature 1..37: note = Description of Artificial Sequence: Syntheticoligonucleotide
  source 1..37: mol_type = other RNA
attgctccttacgaggagacggacgctgtgtggatct

SEQ ID NO: 1790 - RNA, 37 nt, synthetic construct
  misc_feature 1..37: note = Description of Artificial Sequence: Syntheticoligonucleotide
  source 1..37: mol_type = other RNA
attgctccttacgaggagacgacgctgtgtggatctc

SEQ ID NO: 1791 - RNA, 37 nt, synthetic construct
  misc_feature 1..37: note = Description of Artificial Sequence: Syntheticoligonucleotide
  source 1..37: mol_type = other RNA
attgctccttacgaggagacccgggggcaaagagatc

SEQ ID NO: 1792 - RNA, 37 nt, synthetic construct
  misc_feature 1..37: note = Description of Artificial Sequence: Syntheticoligonucleotide
  source 1..37: mol_type = other RNA
attgctccttacgaggagacgcccccgggaaggacat

SEQ ID NO: 1793 - RNA, 37 nt, synthetic construct
  misc_feature 1..37: note = Description of Artificial Sequence: Syntheticoligonucleotide
  source 1..37: mol_type = other RNA
attgctccttacgaggagaccccccgggaaggacatc

SEQ ID NO: 1794 - RNA, 37 nt, synthetic construct
  misc_feature 1..37: note = Description of Artificial Sequence: Syntheticoligonucleotide
  source 1..37: mol_type = other RNA
attgctccttacgaggagacatgtcacagagtgggac

SEQ ID NO: 1795 - RNA, 37 nt, synthetic construct
  misc_feature 1..37: note = Description of Artificial Sequence: Syntheticoligonucleotide
  source 1..37: mol_type = other RNA
attgctccttacgaggagactggctcggatgctgagc

SEQ ID NO: 1796 - RNA, 37 nt, synthetic construct
  misc_feature 1..37: note = Description of Artificial Sequence: Syntheticoligonucleotide
  source 1..37: mol_type = other RNA
attgctccttacgaggagacccctggccgagctgcgg

SEQ ID NO: 1797 - RNA, 37 nt, synthetic construct
  misc_feature 1..37: note = Description of Artificial Sequence: Syntheticoligonucleotide
  source 1..37: mol_type = other RNA
attgctccttacgaggagacgtagagaagtggatcag

SEQ ID NO: 1798 - RNA, 37 nt, synthetic construct
  misc_feature 1..37: note = Description of Artificial Sequence: Syntheticoligonucleotide
  source 1..37: mol_type = other RNA
attgctccttacgaggagacggtagagaagtggatca

SEQ ID NO: 1799 - RNA, 37 nt, synthetic construct
  misc_feature 1..37: note = Description of Artificial Sequence: Syntheticoligonucleotide
  source 1..37: mol_type = other RNA
attgctccttacgaggagactctaccaaagacgtcat

SEQ ID NO: 1800 - RNA, 37 nt, synthetic construct
  misc_feature 1..37: note = Description of Artificial Sequence: Syntheticoligonucleotide
  source 1..37: mol_type = other RNA
attgctccttacgaggagacatgacgtctttggtaga

SEQ ID NO: 1801 - RNA, 37 nt, synthetic construct
  misc_feature 1..37: note = Description of Artificial Sequence: Syntheticoligonucleotide
  source 1..37: mol_type = other RNA
attgctccttacgaggagaccctgaggaccagcaggt

SEQ ID NO: 1802 - RNA, 37 nt, synthetic construct
  misc_feature 1..37: note = Description of Artificial Sequence: Syntheticoligonucleotide
  source 1..37: mol_type = other RNA
attgctccttacgaggagacggggtcagcacctgctg

SEQ ID NO: 1803 - RNA, 37 nt, synthetic construct
  misc_feature 1..37: note = Description of Artificial Sequence: Syntheticoligonucleotide
  source 1..37: mol_type = other RNA
attgctccttacgaggagacgagtgggccccgagtgt

SEQ ID NO: 1804 - RNA, 37 nt, synthetic construct
  misc_feature 1..37: note = Description of Artificial Sequence: Syntheticoligonucleotide
  source 1..37: mol_type = other RNA
attgctccttacgaggagactggggcacagcgggctg

SEQ ID NO: 1805 - RNA, 37 nt, synthetic construct
  misc_feature 1..37: note = Description of Artificial Sequence: Syntheticoligonucleotide
  source 1..37: mol_type = other RNA
attgctccttacgaggagactccaggagcgggaggcg

SEQ ID NO: 1806 - RNA, 37 nt, synthetic construct
  misc_feature 1..37: note = Description of Artificial Sequence: Syntheticoligonucleotide
  source 1..37: mol_type = other RNA
attgctccttacgaggagaccagacctgctggcctcc

SEQ ID NO: 1807 - RNA, 37 nt, synthetic construct
  misc_feature 1..37: note = Description of Artificial Sequence: Syntheticoligonucleotide
  source 1..37: mol_type = other RNA
attgctccttacgaggagacagggccttgcagacctg

SEQ ID NO: 1808 - RNA, 37 nt, synthetic construct
  misc_feature 1..37: note = Description of Artificial Sequence: Syntheticoligonucleotide
  source 1..37: mol_type = other RNA
attgctccttacgaggagacgggggtgagggtgtcta

SEQ ID NO: 1809 - RNA, 37 nt, synthetic construct
  misc_feature 1..37: note = Description of Artificial Sequence: Syntheticoligonucleotide
  source 1..37: mol_type = other RNA
attgctccttacgaggagacggggtgagggtgtctat

SEQ ID NO: 1810 - RNA, 37 nt, synthetic construct
  misc_feature 1..37: note = Description of Artificial Sequence: Syntheticoligonucleotide
  source 1..37: mol_type = other RNA
attgctccttacgaggagacgcacggggaaccaggca

SEQ ID NO: 1811 - RNA, 37 nt, synthetic construct
  misc_feature 1..37: note = Description of Artificial Sequence: Syntheticoligonucleotide
  source 1..37: mol_type = other RNA
attgctccttacgaggagaccccgtgccaactgcagc

SEQ ID NO: 1812 - RNA, 37 nt, synthetic construct
  misc_feature 1..37: note = Description of Artificial Sequence: Syntheticoligonucleotide
  source 1..37: mol_type = other RNA
attgctccttacgaggagactggatgctgcagttggc

SEQ ID NO: 1813 - RNA, 37 nt, synthetic construct
  misc_feature 1..37: note = Description of Artificial Sequence: Syntheticoligonucleotide
  source 1..37: mol_type = other RNA
attgctccttacgaggagactggtggcagtggacatg

SEQ ID NO: 1814 - RNA, 37 nt, synthetic construct
  misc_feature 1..37: note = Description of Artificial Sequence: Syntheticoligonucleotide
  source 1..37: mol_type = other RNA
attgctccttacgaggagaccacttcccaatggaagc

SEQ ID NO: 1815 - RNA, 37 nt, synthetic construct
  misc_feature 1..37: note = Description of Artificial Sequence: Syntheticoligonucleotide
  source 1..37: mol_type = other RNA
attgctccttacgaggagaccattgggaagtggaaga

SEQ ID NO: 1816 - RNA, 37 nt, synthetic construct
  misc_feature 1..37: note = Description of Artificial Sequence: Syntheticoligonucleotide
  source 1..37: mol_type = other RNA
attgctccttacgaggagacggaagtggaagacctta

SEQ ID NO: 1817 - RNA, 37 nt, synthetic construct
  misc_feature 1..37: note = Description of Artificial Sequence: Syntheticoligonucleotide
  source 1..37: mol_type = other RNA
attgctccttacgaggagacgtgtccggaggcagcct

SEQ ID NO: 1818 - RNA, 37 nt, synthetic construct
  misc_feature 1..37: note = Description of Artificial Sequence: Syntheticoligonucleotide
  source 1..37: mol_type = other RNA
attgctccttacgaggagacgccaccaggcggccagt

SEQ ID NO: 1819 - RNA, 37 nt, synthetic construct
  misc_feature 1..37: note = Description of Artificial Sequence: Syntheticoligonucleotide
  source 1..37: mol_type = other RNA
attgctccttacgaggagacctgctgccatgccccag

SEQ ID NO: 1820 - RNA, 37 nt, synthetic construct
  misc_feature 1..37: note = Description of Artificial Sequence: Syntheticoligonucleotide
  source 1..37: mol_type = other RNA
attgctccttacgaggagaccagccctggggcatggc

SEQ ID NO: 1821 - RNA, 37 nt, synthetic construct
  misc_feature 1..37: note = Description of Artificial Sequence: Syntheticoligonucleotide
  source 1..37: mol_type = other RNA
attgctccttacgaggagaccattccagccctggggc

SEQ ID NO: 1822 - RNA, 37 nt, synthetic construct
  misc_feature 1..37: note = Description of Artificial Sequence: Syntheticoligonucleotide
  source 1..37: mol_type = other RNA
attgctccttacgaggagacgcattccagccctgggg

SEQ ID NO: 1823 - RNA, 37 nt, synthetic construct
  misc_feature 1..37: note = Description of Artificial Sequence: Syntheticoligonucleotide
  source 1..37: mol_type = other RNA
attgctccttacgaggagactgcattccagccctggg

SEQ ID NO: 1824 - RNA, 37 nt, synthetic construct
  misc_feature 1..37: note = Description of Artificial Sequence: Syntheticoligonucleotide
  source 1..37: mol_type = other RNA
attgctccttacgaggagacattttgcattccagccc

SEQ ID NO: 1825 - RNA, 37 nt, synthetic construct
  misc_feature 1..37: note = Description of Artificial Sequence: Syntheticoligonucleotide
  source 1..37: mol_type = other RNA
attgctccttacgaggagaccatccagtcagggtcca

SEQ ID NO: 1826 - RNA, 37 nt, synthetic construct
  misc_feature 1..37: note = Description of Artificial Sequence: Syntheticoligonucleotide
  source 1..37: mol_type = other RNA
attgctccttacgaggagactccacgctgtaggctcc

SEQ ID NO: 1827 - RNA, 37 nt, synthetic construct
  misc_feature 1..37: note = Description of Artificial Sequence: Syntheticoligonucleotide
  source 1..37: mol_type = other RNA
attgctccttacgaggagacccacacacaggttgtcc

SEQ ID NO: 1828 - RNA, 37 nt, synthetic construct
  misc_feature 1..37: note = Description of Artificial Sequence: Syntheticoligonucleotide
  source 1..37: mol_type = other RNA
attgctccttacgaggagactccactggtcctgtctg

SEQ ID NO: 1829 - RNA, 37 nt, synthetic construct
  misc_feature 1..37: note = Description of Artificial Sequence: Syntheticoligonucleotide
  source 1..37: mol_type = other RNA
attgctccttacgaggagacctgaaggccggctccgg

SEQ ID NO: 1830 - DNA, 37 bp, synthetic construct
  misc_feature 1..37: note = Description of Artificial Sequence: Syntheticoligonucleotide
  source 1..37: mol_type = other DNA
attgctccttacgaggagacgaagctatgttttccat

SEQ ID NO: 1831 - DNA, 37 bp, synthetic construct
  misc_feature 1..37: note = Description of Artificial Sequence: Syntheticoligonucleotide
  source 1..37: mol_type = other DNA
attgctccttacgaggagacgcaggggcagccgcccc

SEQ ID NO: 1832 - DNA, 37 bp, synthetic construct
  misc_feature 1..37: note = Description of Artificial Sequence: Syntheticoligonucleotide
  source 1..37: mol_type = other DNA
attgctccttacgaggagacctcctagaacccaacag

SEQ ID NO: 1833 - DNA, 37 bp, synthetic construct
  misc_feature 1..37: note = Description of Artificial Sequence: Syntheticoligonucleotide
  source 1..37: mol_type = other DNA
attgctccttacgaggagacgaaagacctcctctgtg

SEQ ID NO: 1834 - DNA, 37 bp, synthetic construct
  misc_feature 1..37: note = Description of Artificial Sequence: Syntheticoligonucleotide
  source 1..37: mol_type = other DNA
attgctccttacgaggagactccatctcggggttggc

SEQ ID NO: 1835 - DNA, 37 bp, synthetic construct
  misc_feature 1..37: note = Description of Artificial Sequence: Syntheticoligonucleotide
  source 1..37: mol_type = other DNA
attgctccttacgaggagacttcctgatggtggagat

SEQ ID NO: 1836 - DNA, 37 bp, synthetic construct
  misc_feature 1..37: note = Description of Artificial Sequence: Syntheticoligonucleotide
  source 1..37: mol_type = other DNA
attgctccttacgaggagacctgactcccagctctga

SEQ ID NO: 1837 - DNA, 37 bp, synthetic construct
  misc_feature 1..37: note = Description of Artificial Sequence: Syntheticoligonucleotide
  source 1..37: mol_type = other DNA
attgctccttacgaggagactggggtcagagctggga

SEQ ID NO: 1838 - DNA, 37 bp, synthetic construct; identical to SEQ ID NO: 1833
  misc_feature 1..37: note = Description of Artificial Sequence: Syntheticoligonucleotide
  source 1..37: mol_type = other DNA

SEQ ID NO: 1839 - DNA, 37 bp, synthetic construct
  misc_feature 1..37: note = Description of Artificial Sequence: Syntheticoligonucleotide
  source 1..37: mol_type = other DNA
attgctccttacgaggagaccgaagctatgttttcca

SEQ ID NO: 1840 - DNA, 37 bp, synthetic construct; identical to SEQ ID NO: 1830
  misc_feature 1..37: note = Description of Artificial Sequence: Syntheticoligonucleotide
  source 1..37: mol_type = other DNA

SEQ ID NO: 1841 - DNA, 37 bp, synthetic construct
  misc_feature 1..37: note = Description of Artificial Sequence: Syntheticoligonucleotide
  source 1..37: mol_type = other DNA
attgctccttacgaggagactccatctccaccatcag

SEQ ID NO: 1842 - DNA, 37 bp, synthetic construct
  misc_feature 1..37: note = Description of Artificial Sequence: Syntheticoligonucleotide
  source 1..37: mol_type = other DNA
attgctccttacgaggagacccatctccaccatcagg

SEQ ID NO: 1843 - DNA, 37 bp, synthetic construct
  misc_feature 1..37: note = Description of Artificial Sequence: Syntheticoligonucleotide
  source 1..37: mol_type = other DNA
attgctccttacgaggagacctgatggtggagatgga

SEQ ID NO: 1844 - DNA, 37 bp, synthetic construct
  misc_feature 1..37: note = Description of Artificial Sequence: Syntheticoligonucleotide
  source 1..37: mol_type = other DNA
attgctccttacgaggagaccatctccaccatcagga

SEQ ID NO: 1845 - DNA, 37 bp, synthetic construct; identical to SEQ ID NO: 1835
  misc_feature 1..37: note = Description of Artificial Sequence: Syntheticoligonucleotide
  source 1..37: mol_type = other DNA

SEQ ID NO: 1846 - DNA, 37 bp, synthetic construct; identical to SEQ ID NO: 1831
  misc_feature 1..37: note = Description of Artificial Sequence: Syntheticoligonucleotide
  source 1..37: mol_type = other DNA

SEQ ID NO: 1847 - DNA, 37 bp, synthetic construct; identical to SEQ ID NO: 1834
  misc_feature 1..37: note = Description of Artificial Sequence: Syntheticoligonucleotide
  source 1..37: mol_type = other DNA

SEQ ID NO: 1848 - DNA, 37 bp, synthetic construct
  misc_feature 1..37: note = Description of Artificial Sequence: Syntheticoligonucleotide
  source 1..37: mol_type = other DNA
attgctccttacgaggagactaggagcaaattgtcca

SEQ ID NO: 1849 - DNA, 37 bp, synthetic construct
  misc_feature 1..37: note = Description of Artificial Sequence: Syntheticoligonucleotide
  source 1..37: mol_type = other DNA
attgctccttacgaggagacggttctaggagcaaatt

SEQ ID NO: 1850 - DNA, 37 bp, synthetic construct
  misc_feature 1..37: note = Description of Artificial Sequence: Syntheticoligonucleotide
  source 1..37: mol_type = other DNA
attgctccttacgaggagacgctcctagaacccaaca

SEQ ID NO: 1851 - DNA, 37 bp, synthetic construct; identical to SEQ ID NO: 1832
  misc_feature 1..37: note = Description of Artificial Sequence: Syntheticoligonucleotide
  source 1..37: mol_type = other DNA

SEQ ID NO: 1852 - DNA, 37 bp, synthetic construct
  misc_feature 1..37: note = Description of Artificial Sequence: Syntheticoligonucleotide
  source 1..37: mol_type = other DNA
attgctccttacgaggagactccagacgccatctttc

SEQ ID NO: 1853 - DNA, 37 bp, synthetic construct
  misc_feature 1..37: note = Description of Artificial Sequence: Syntheticoligonucleotide
  source 1..37: mol_type = other DNA
attgctccttacgaggagactggtaagagtcctcctg

SEQ ID NO: 1854 - DNA, 37 bp, synthetic construct
  misc_feature 1..37: note = Description of Artificial Sequence: Syntheticoligonucleotide
  source 1..37: mol_type = other DNA
attgctccttacgaggagacttacagcatcttgggtc

SEQ ID NO: 1855 - DNA, 37 bp, synthetic construct
  misc_feature 1..37: note = Description of Artificial Sequence: Syntheticoligonucleotide
  source 1..37: mol_type = other DNA
attgctccttacgaggagacggtcaggtgggccggca

SEQ ID NO: 1856 - DNA, 37 bp, synthetic construct
  misc_feature 1..37: note = Description of Artificial Sequence: Syntheticoligonucleotide
  source 1..37: mol_type = other DNA
attgctccttacgaggagacctatcattggagatgac

SEQ ID NO: 1857 - DNA, 37 bp, synthetic construct
  misc_feature 1..37: note = Description of Artificial Sequence: Syntheticoligonucleotide
  source 1..37: mol_type = other DNA
attgctccttacgaggagacgagatgacattaaccgg

SEQ ID NO: 1858 - DNA, 37 bp, synthetic construct
  misc_feature 1..37: note = Description of Artificial Sequence: Syntheticoligonucleotide
  source 1..37: mol_type = other DNA
attgctccttacgaggagactggaactctgtgtcgta

SEQ ID NO: 1859 - DNA, 37 bp, synthetic construct
  misc_feature 1..37: note = Description of Artificial Sequence: Syntheticoligonucleotide
  source 1..37: mol_type = other DNA
attgctccttacgaggagaccagaatttactggagca

SEQ ID NO: 1860 - DNA, 37 bp, synthetic construct
  misc_feature 1..37: note = Description of Artificial Sequence: Syntheticoligonucleotide
  source 1..37: mol_type = other DNA
attgctccttacgaggagacactggagcagctgcagc

SEQ ID NO: 1861 - DNA, 37 bp, synthetic construct
  misc_feature 1..37: note = Description of Artificial Sequence: Syntheticoligonucleotide
  source 1..37: mol_type = other DNA
attgctccttacgaggagacccagctgtgggctgcag

SEQ ID NO: 1862 - DNA, 37 bp, synthetic construct
  misc_feature 1..37: note = Description of Artificial Sequence: Syntheticoligonucleotide
  source 1..37: mol_type = other DNA
attgctccttacgaggagacgtaggcattcccagctg

SEQ ID NO: 1863 - DNA, 37 bp, synthetic construct
  misc_feature 1..37: note = Description of Artificial Sequence: Syntheticoligonucleotide
  source 1..37: mol_type = other DNA
attgctccttacgaggagacgtgaagagttcgtaggc

SEQ ID NO: 1864 - DNA, 37 bp, synthetic construct
  misc_feature 1..37: note = Description of Artificial Sequence: Syntheticoligonucleotide
  source 1..37: mol_type = other DNA
attgctccttacgaggagacaccaagattgcctccag

SEQ ID NO: 1865 - DNA, 37 bp, synthetic construct
  misc_feature 1..37: note = Description of Artificial Sequence: Syntheticoligonucleotide
  source 1..37: mol_type = other DNA
attgctccttacgaggagaccctccaggtacccacca

SEQ ID NO: 1866 - DNA, 37 bp, synthetic construct
  misc_feature 1..37: note = Description of Artificial Sequence: Syntheticoligonucleotide
  source 1..37: mol_type = other DNA
attgctccttacgaggagacctaatgtggatactaac

SEQ ID NO: 1867 - DNA, 37 bp, synthetic construct
  misc_feature 1..37: note = Description of Artificial Sequence: Syntheticoligonucleotide
  source 1..37: mol_type = other DNA
attgctccttacgaggagacttccgtgtggcagctga

SEQ ID NO: 1868 - DNA, 37 bp, synthetic construct
  misc_feature 1..37: note = Description of Artificial Sequence: Syntheticoligonucleotide
  source 1..37: mol_type = other DNA
attgctccttacgaggagacctgatggcaacttcaac

SEQ ID NO: 1869 - DNA, 37 bp, synthetic construct
  misc_feature 1..37: note = Description of Artificial Sequence: Syntheticoligonucleotide
  source 1..37: mol_type = other DNA
attgctccttacgaggagactactttgctagcaaact

SEQ ID NO: 1870 - DNA, 37 bp, synthetic construct
  misc_feature 1..37: note = Description of Artificial Sequence: Syntheticoligonucleotide
  source 1..37: mol_type = other DNA
attgctccttacgaggagacagcaccagtttgctagc

SEQ ID NO: 1871 - DNA, 37 bp, synthetic construct
  misc_feature 1..37: note = Description of Artificial Sequence: Syntheticoligonucleotide
  source 1..37: mol_type = other DNA
attgctccttacgaggagacaactggggccgggttgt

SEQ ID NO: 1872 - DNA, 37 bp, synthetic construct
  misc_feature 1..37: note = Description of Artificial Sequence: Syntheticoligonucleotide
  source 1..37: mol_type = other DNA
attgctccttacgaggagacttctctttcctgtagga

SEQ ID NO: 1873 - DNA, 37 bp, synthetic construct
  misc_feature 1..37: note = Description of Artificial Sequence: Syntheticoligonucleotide
  source 1..37: mol_type = other DNA
attgctccttacgaggagactctttcctgtaggatga

SEQ ID NO: 1874 - DNA, 37 bp, synthetic construct
  misc_feature 1..37: note = Description of Artificial Sequence: Syntheticoligonucleotide
  source 1..37: mol_type = other DNA
attgctccttacgaggagaccctgtaggatgattgct

SEQ ID NO: 1875 - DNA, 37 bp, synthetic construct
  misc_feature 1..37: note = Description of Artificial Sequence: Syntheticoligonucleotide
  source 1..37: mol_type = other DNA
attgctccttacgaggagacctgtaggatgattgcta

SEQ ID NO: 1876 - DNA, 37 bp, synthetic construct; identical to SEQ ID NO: 1866
  misc_feature 1..37: note = Description of Artificial Sequence: Syntheticoligonucleotide
  source 1..37: mol_type = other DNA

SEQ ID NO: 1877 - DNA, 37 bp, synthetic construct; identical to SEQ ID NO: 1867
  misc_feature 1..37: note = Description of Artificial Sequence: Syntheticoligonucleotide
  source 1..37: mol_type = other DNA

SEQ ID NO: 1878 - DNA, 37 bp, synthetic construct
  misc_feature 1..37: note = Description of Artificial Sequence: Syntheticoligonucleotide
  source 1..37: mol_type = other DNA
attgctccttacgaggagaccgtgtggcagctgacat

SEQ ID NO: 1879 - DNA, 37 bp, synthetic construct
  misc_feature 1..37: note = Description of Artificial Sequence: Syntheticoligonucleotide
  source 1..37: mol_type = other DNA
attgctccttacgaggagacccatcagcaaacatgtc

SEQ ID NO: 1880 - DNA, 37 bp, synthetic construct
  misc_feature 1..37: note = Description of Artificial Sequence: Syntheticoligonucleotide
  source 1..37: mol_type = other DNA
attgctccttacgaggagacaagttgccatcagcaaa

SEQ ID NO: 1881 - DNA, 37 bp, synthetic construct
  misc_feature 1..37: note = Description of Artificial Sequence: Syntheticoligonucleotide
  source 1..37: mol_type = other DNA
attgctccttacgaggagacgctgatggcaacttcaa

SEQ ID NO: 1882 - DNA, 37 bp, synthetic construct; identical to SEQ ID NO: 1868
  misc_feature 1..37: note = Description of Artificial Sequence: Syntheticoligonucleotide
  source 1..37: mol_type = other DNA

SEQ ID NO: 1883 - DNA, 37 bp, synthetic construct; identical to SEQ ID NO: 1871
  misc_feature 1..37: note = Description of Artificial Sequence: Syntheticoligonucleotide
  source 1..37: mol_type = other DNA

SEQ ID NO: 1884 - DNA, 37 bp, synthetic construct
  misc_feature 1..37: note = Description of Artificial Sequence: Syntheticoligonucleotide
  source 1..37: mol_type = other DNA
attgctccttacgaggagacttgcccttttctacttt

SEQ ID NO: 1885 - DNA, 37 bp, synthetic construct
  misc_feature 1..37: note = Description of Artificial Sequence: Syntheticoligonucleotide
  source 1..37: mol_type = other DNA
attgctccttacgaggagaccccttttctactttgct

SEQ ID NO: 1886 - DNA, 37 bp, synthetic construct
  misc_feature 1..37: note = Description of Artificial Sequence: Syntheticoligonucleotide
  source 1..37: mol_type = other DNA
attgctccttacgaggagacctagcaaagtagaaaag

SEQ ID NO: 1887 - DNA, 37 bp, synthetic construct
  misc_feature 1..37: note = Description of Artificial Sequence: Syntheticoligonucleotide
  source 1..37: mol_type = other DNA
attgctccttacgaggagacgctagcaaagtagaaaa

SEQ ID NO: 1888 - DNA, 37 bp, synthetic construct
  misc_feature 1..37: note = Description of Artificial Sequence: Syntheticoligonucleotide
  source 1..37: mol_type = other DNA
attgctccttacgaggagactctactttgctagcaaa

SEQ ID NO: 1889 - DNA, 37 bp, synthetic construct
  misc_feature 1..37: note = Description of Artificial Sequence: Syntheticoligonucleotide
  source 1..37: mol_type = other DNA
attgctccttacgaggagacctactttgctagcaaac

SEQ ID NO: 1890 - DNA, 37 bp, synthetic construct; identical to SEQ ID NO: 1869
  misc_feature 1..37: note = Description of Artificial Sequence: Syntheticoligonucleotide
  source 1..37: mol_type = other DNA

SEQ ID NO: 1891 - DNA, 37 bp, synthetic construct
  misc_feature 1..37: note = Description of Artificial Sequence: Syntheticoligonucleotide
  source 1..37: mol_type = other DNA
attgctccttacgaggagacgctagcaaactggtgct

SEQ ID NO: 1892 - DNA, 37 bp, synthetic construct
  misc_feature 1..37: note = Description of Artificial Sequence: Syntheticoligonucleotide
  source 1..37: mol_type = other DNA
attgctccttacgaggagacctagcaaactggtgctc

SEQ ID NO: 1893 - DNA, 37 bp, synthetic construct; identical to SEQ ID NO: 1870
  misc_feature 1..37: note = Description of Artificial Sequence: Syntheticoligonucleotide
  source 1..37: mol_type = other DNA

SEQ ID NO: 1894 - DNA, 37 bp, synthetic construct
  misc_feature 1..37: note = Description of Artificial Sequence: Syntheticoligonucleotide
  source 1..37: mol_type = other DNA
attgctccttacgaggagacccactttgtcagtgcgt

SEQ ID NO: 1895 - DNA, 37 bp, synthetic construct
  misc_feature 1..37: note = Description of Artificial Sequence: Syntheticoligonucleotide
  source 1..37: mol_type = other DNA
attgctccttacgaggagacctcaatgggatggaagg

SEQ ID NO: 1896 - DNA, 37 bp, synthetic construct
  misc_feature 1..37: note = Description of Artificial Sequence: Syntheticoligonucleotide
  source 1..37: mol_type = other DNA
attgctccttacgaggagacaggaatacatggtacac

SEQ ID NO: 1897 - DNA, 37 bp, synthetic construct
  misc_feature 1..37: note = Description of Artificial Sequence: Syntheticoligonucleotide
  source 1..37: mol_type = other DNA
attgctccttacgaggagacaagaacattttcagctt

SEQ ID NO: 1898 - DNA, 37 bp, synthetic construct
  misc_feature 1..37: note = Description of Artificial Sequence: Syntheticoligonucleotide
  source 1..37: mol_type = other DNA
attgctccttacgaggagacatccactttcattctgc

SEQ ID NO: 1899 - DNA, 37 bp, synthetic construct
  misc_feature 1..37: note = Description of Artificial Sequence: Syntheticoligonucleotide
  source 1..37: mol_type = other DNA
attgctccttacgaggagactttgttaaaggaggcaa

SEQ ID NO: 1900 - DNA, 37 bp, synthetic construct
  misc_feature 1..37: note = Description of Artificial Sequence: Syntheticoligonucleotide
  source 1..37: mol_type = other DNA
attgctccttacgaggagactccccagagtccatgtc

SEQ ID NO: 1901 - DNA, 37 bp, synthetic construct
  misc_feature 1..37: note = Description of Artificial Sequence: Syntheticoligonucleotide
  source 1..37: mol_type = other DNA
attgctccttacgaggagactcagtgcgtctgacatg

SEQ ID NO: 1902 - DNA, 37 bp, synthetic construct
  misc_feature 1..37: note = Description of Artificial Sequence: Syntheticoligonucleotide
  source 1..37: mol_type = other DNA
attgctccttacgaggagacgtcagtgcgtctgacat

SEQ ID NO: 1903 - DNA, 37 bp, synthetic construct; identical to SEQ ID NO: 1894
  misc_feature 1..37: note = Description of Artificial Sequence: Syntheticoligonucleotide
  source 1..37: mol_type = other DNA

SEQ ID NO: 1904 - DNA, 37 bp, synthetic construct
  misc_feature 1..37: note = Description of Artificial Sequence: Syntheticoligonucleotide
  source 1..37: mol_type = other DNA
attgctccttacgaggagactgttcccactttgtcag

SEQ ID NO: 1905 - DNA, 37 bp, synthetic construct; identical to SEQ ID NO: 1895
  misc_feature 1..37: note = Description of Artificial Sequence: Syntheticoligonucleotide
  source 1..37: mol_type = other DNA

SEQ ID NO: 1906 - DNA, 37 bp, synthetic construct
  misc_feature 1..37: note = Description of Artificial Sequence: Syntheticoligonucleotide
  source 1..37: mol_type = other DNA
attgctccttacgaggagaccatcccattgaggaata

SEQ ID NO: 1907 - DNA, 37 bp, synthetic construct; identical to SEQ ID NO: 1896
  misc_feature 1..37: note = Description of Artificial Sequence: Syntheticoligonucleotide
  source 1..37: mol_type = other DNA

SEQ ID NO: 1908 - DNA, 37 bp, synthetic construct
  misc_feature 1..37: note = Description of Artificial Sequence: Syntheticoligonucleotide
  source 1..37: mol_type = other DNA
attgctccttacgaggagacaacgtgtaccatgtatt

SEQ ID NO: 1909 - DNA, 37 bp, synthetic construct
  misc_feature 1..37: note = Description of Artificial Sequence: Syntheticoligonucleotide
  source 1..37: mol_type = other DNA
attgctccttacgaggagacttcaacgtgtaccatgt

SEQ ID NO: 1910 - DNA, 37 bp, synthetic construct; identical to SEQ ID NO: 1897
  misc_feature 1..37: note = Description of Artificial Sequence: Syntheticoligonucleotide
  source 1..37: mol_type = other DNA

SEQ ID NO: 1911 - DNA, 37 bp, synthetic construct
  misc_feature 1..37: note = Description of Artificial Sequence: Syntheticoligonucleotide
  source 1..37: mol_type = other DNA
attgctccttacgaggagacgagaagctgaaaatgtt

SEQ ID NO: 1912 - DNA, 37 bp, synthetic construct
  misc_feature 1..37: note = Description of Artificial Sequence: Syntheticoligonucleotide
  source 1..37: mol_type = other DNA
attgctccttacgaggagactcagcttctcgaacgca

SEQ ID NO: 1913 - DNA, 37 bp, synthetic construct
  misc_feature 1..37: note = Description of Artificial Sequence: Syntheticoligonucleotide
  source 1..37: mol_type = other DNA
attgctccttacgaggagaccagcttctcgaacgcag

SEQ ID NO: 1914 - DNA, 37 bp, synthetic construct
  misc_feature 1..37: note = Description of Artificial Sequence: Syntheticoligonucleotide
  source 1..37: mol_type = other DNA
attgctccttacgaggagactgcgttcgagaagctga

SEQ ID NO: 1915 - DNA, 37 bp, synthetic construct
  misc_feature 1..37: note = Description of Artificial Sequence: Syntheticoligonucleotide
  source 1..37: mol_type = other DNA
attgctccttacgaggagacagcttctcgaacgcaga

SEQ ID NO: 1916 - DNA, 37 bp, synthetic construct
  misc_feature 1..37: note = Description of Artificial Sequence: Syntheticoligonucleotide
  source 1..37: mol_type = other DNA
attgctccttacgaggagacattctgcgttcgagaag

SEQ ID NO: 1917 - DNA, 37 bp, synthetic construct
  misc_feature 1..37: note = Description of Artificial Sequence: Syntheticoligonucleotide
  source 1..37: mol_type = other DNA
attgctccttacgaggagaccattctgcgttcgagaa

SEQ ID NO: 1918 - DNA, 37 bp, synthetic construct
  misc_feature 1..37: note = Description of Artificial Sequence: Syntheticoligonucleotide
  source 1..37: mol_type = other DNA
attgctccttacgaggagactcgaacgcagaatgaaa

SEQ ID NO: 1919 - DNA, 37 bp, synthetic construct; identical to SEQ ID NO: 1898
  misc_feature 1..37: note = Description of Artificial Sequence: Syntheticoligonucleotide
  source 1..37: mol_type = other DNA

SEQ ID NO: 1920 - DNA, 37 bp, synthetic construct
  misc_feature 1..37: note = Description of Artificial Sequence: Syntheticoligonucleotide
  source 1..37: mol_type = other DNA
attgctccttacgaggagactatccactttcattctg

SEQ ID NO: 1921 - DNA, 37 bp, synthetic construct
  misc_feature 1..37: note = Description of Artificial Sequence: Syntheticoligonucleotide
  source 1..37: mol_type = other DNA
attgctccttacgaggagacttatccactttcattct

SEQ ID NO: 1922 - DNA, 37 bp, synthetic construct
  misc_feature 1..37: note = Description of Artificial Sequence: Syntheticoligonucleotide
  source 1..37: mol_type = other DNA
attgctccttacgaggagactttatccactttcattc

SEQ ID NO: 1923 - DNA, 37 bp, synthetic construct
  misc_feature 1..37: note = Description of Artificial Sequence: Syntheticoligonucleotide
  source 1..37: mol_type = other DNA
attgctccttacgaggagacttttatccactttcatt

SEQ ID NO: 1924 - DNA, 37 bp, synthetic construct
  misc_feature 1..37: note = Description of Artificial Sequence: Syntheticoligonucleotide
  source 1..37: mol_type = other DNA
attgctccttacgaggagacaacaaagaagggtcatc

SEQ ID NO: 1925 - DNA, 37 bp, synthetic construct
  misc_feature 1..37: note = Description of Artificial Sequence: Syntheticoligonucleotide
  source 1..37: mol_type = other DNA
attgctccttacgaggagaccctcctttaacaaagaa

SEQ ID NO: 1926 - DNA, 37 bp, synthetic construct
  misc_feature 1..37: note = Description of Artificial Sequence: Syntheticoligonucleotide
  source 1..37: mol_type = other DNA
attgctccttacgaggagacgcctcctttaacaaaga

SEQ ID NO: 1927 - DNA, 37 bp, synthetic construct; identical to SEQ ID NO: 1899
  misc_feature 1..37: note = Description of Artificial Sequence: Syntheticoligonucleotide
  source 1..37: mol_type = other DNA

SEQ ID NO: 1928 - DNA, 37 bp, synthetic construct
  misc_feature 1..37: note = Description of Artificial Sequence: Syntheticoligonucleotide
  source 1..37: mol_type = other DNA
attgctccttacgaggagacgttaaaggaggcaaaga

SEQ ID NO: 1929 - DNA, 37 bp, synthetic construct
  misc_feature 1..37: note = Description of Artificial Sequence: Syntheticoligonucleotide
  source 1..37: mol_type = other DNA
attgctccttacgaggagacttaaaggaggcaaagac

SEQ ID NO: 1930 - DNA, 37 bp, synthetic construct
  misc_feature 1..37: note = Description of Artificial Sequence: Syntheticoligonucleotide
  source 1..37: mol_type = other DNA
attgctccttacgaggagactctttgcctcctttaac

SEQ ID NO: 1931 - DNA, 37 bp, synthetic construct
  misc_feature 1..37: note = Description of Artificial Sequence: Syntheticoligonucleotide
  source 1..37: mol_type = other DNA
attgctccttacgaggagacgtctttgcctcctttaa

SEQ ID NO: 1932 - DNA, 37 bp, synthetic construct
  misc_feature 1..37: note = Description of Artificial Sequence: Syntheticoligonucleotide
  source 1..37: mol_type = other DNA
attgctccttacgaggagacgtctaacttactttgtc

SEQ ID NO: 1933 - DNA, 37 bp, synthetic construct
  misc_feature 1..37: note = Description of Artificial Sequence: Syntheticoligonucleotide
  source 1..37: mol_type = other DNA
attgctccttacgaggagacttggtctaacttacttt

SEQ ID NO: 1934 - DNA, 20 bp, synthetic construct
  misc_feature 1..20: note = Description of Artificial Sequence: Syntheticoligonucleotide
  source 1..20: mol_type = other DNA
agcaggctgttgtgtgacat

SEQ ID NO: 1935 - DNA, 20 bp, synthetic construct
  misc_feature 1..20: note = Description of Artificial Sequence: Syntheticoligonucleotide
  source 1..20: mol_type = other DNA
catgtcacacaacagcctgc

SEQ ID NO: 1936 - DNA, 20 bp, synthetic construct
  misc_feature 1..20: note = Description of Artificial Sequence: Syntheticoligonucleotide
  source 1..20: mol_type = other DNA
tgtgacatggaaggtgatga

SEQ ID NO: 1937 - DNA, 20 bp, synthetic construct
  misc_feature 1..20: note = Description of Artificial Sequence: Syntheticoligonucleotide
  source 1..20: mol_type = other DNA
atcaccttccatgtcacaca

SEQ ID NO: 1938 - DNA, 20 bp, synthetic construct
  misc_feature 1..20: note = Description of Artificial Sequence: Syntheticoligonucleotide
  source 1..20: mol_type = other DNA
gcataagcctccctggtctc

SEQ ID NO: 1939 - DNA, 20 bp, synthetic construct
  misc_feature 1..20: note = Description of Artificial Sequence: Syntheticoligonucleotide
  source 1..20: mol_type = other DNA
caggactcccagctggaggg

SEQ ID NO: 1940 - DNA, 20 bp, synthetic construct
  misc_feature 1..20: note = Description of Artificial Sequence: Syntheticoligonucleotide
  source 1..20: mol_type = other DNA
ctcaggccctccagctggga

SEQ ID NO: 1941 - DNA, 20 bp, synthetic construct
  misc_feature 1..20: note = Description of Artificial Sequence: Syntheticoligonucleotide
  source 1..20: mol_type = other DNA
tgctggcatctccatactct

SEQ ID NO: 1942 - DNA, 20 bp, synthetic construct
  misc_feature 1..20: note = Description of Artificial Sequence: Syntheticoligonucleotide
  source 1..20: mol_type = other DNA
tgcccaacttctgctggcat

SEQ ID NO: 1943 - DNA, 20 bp, synthetic construct
  misc_feature 1..20: note = Description of Artificial Sequence: Syntheticoligonucleotide
  source 1..20: mol_type = other DNA
ctgcccaacttctgctggca

SEQ ID NO: 1944 - DNA, 20 bp, synthetic construct
  misc_feature 1..20: note = Description of Artificial Sequence: Syntheticoligonucleotide
  source 1..20: mol_type = other DNA
tctgcccaacttctgctggc

SEQ ID NO: 1945 - DNA, 20 bp, synthetic construct
  misc_feature 1..20: note = Description of Artificial Sequence: Syntheticoligonucleotide
  source 1..20: mol_type = other DNA
tgacttttctgcccaacttc

SEQ ID NO: 1946 - DNA, 20 bp, synthetic construct
  misc_feature 1..20: note = Description of Artificial Sequence: Syntheticoligonucleotide
  source 1..20: mol_type = other DNA
ctgacttttctgcccaactt

SEQ ID NO: 1947 - DNA, 20 bp, synthetic construct
  misc_feature 1..20: note = Description of Artificial Sequence: Syntheticoligonucleotide
  source 1..20: mol_type = other DNA
tctgacttttctgcccaact

SEQ ID NO: 1948 - DNA, 20 bp, synthetic construct
  misc_feature 1..20: note = Description of Artificial Sequence: Syntheticoligonucleotide
  source 1..20: mol_type = other DNA
ccagaggagcttccggcaga

SEQ ID NO: 1949 - DNA, 20 bp, synthetic construct
  misc_feature 1..20: note = Description of Artificial Sequence: Syntheticoligonucleotide
  source 1..20: mol_type = other DNA
aggtctgccggaagctcctc

SEQ ID NO: 1950 - DNA, 20 bp, synthetic construct
  misc_feature 1..20: note = Description of Artificial Sequence: Syntheticoligonucleotide
  source 1..20: mol_type = other DNA
cggcagacctgaagcactgg

SEQ ID NO: 1951 - DNA, 20 bp, synthetic construct
  misc_feature 1..20: note = Description of Artificial Sequence: Syntheticoligonucleotide
  source 1..20: mol_type = other DNA
cagtgcttcaggtctgccgg

SEQ ID NO: 1952 - DNA, 20 bp, synthetic construct
  misc_feature 1..20: note = Description of Artificial Sequence: Syntheticoligonucleotide
  source 1..20: mol_type = other DNA
aacagcgcaggcagtggcag

SEQ ID NO: 1953 - DNA, 20 bp, synthetic construct
  misc_feature 1..20: note = Description of Artificial Sequence: Syntheticoligonucleotide
  source 1..20: mol_type = other DNA
aaccaggagccagcctccgg

SEQ ID NO: 1954 - DNA, 20 bp, synthetic construct
  misc_feature 1..20: note = Description of Artificial Sequence: Syntheticoligonucleotide
  source 1..20: mol_type = other DNA
tccaggcgcatctggccgga

SEQ ID NO: 1955 - DNA, 20 bp, synthetic construct
  misc_feature 1..20: note = Description of Artificial Sequence: Syntheticoligonucleotide
  source 1..20: mol_type = other DNA
ctccaggcgcatctggccgg

SEQ ID NO: 1956 - DNA, 20 bp, synthetic construct
  misc_feature 1..20: note = Description of Artificial Sequence: Syntheticoligonucleotide
  source 1..20: mol_type = other DNA
tctccaggcgcatctggccg

SEQ ID NO: 1957 - DNA, 20 bp, synthetic construct
  misc_feature 1..20: note = Description of Artificial Sequence: Syntheticoligonucleotide
  source 1..20: mol_type = other DNA
ctccagttcctcgttgagct

SEQ ID NO: 1958 - DNA, 20 bp, synthetic construct
  misc_feature 1..20: note = Description of Artificial Sequence: Syntheticoligonucleotide
  source 1..20: mol_type = other DNA
tccagttcctcgttgagctg

SEQ ID NO: 1959 - DNA, 20 bp, synthetic construct
  misc_feature 1..20: note = Description of Artificial Sequence: Syntheticoligonucleotide
  source 1..20: mol_type = other DNA
aggcagctcaacgaggaact

SEQ ID NO: 1960 - DNA, 20 bp, synthetic construct
  misc_feature 1..20: note = Description of Artificial Sequence: Syntheticoligonucleotide
  source 1..20: mol_type = other DNA
ctcgttgagctgcctgaatc

SEQ ID NO: 1961 - DNA, 20 bp, synthetic construct
  misc_feature 1..20: note = Description of Artificial Sequence: Syntheticoligonucleotide
  source 1..20: mol_type = other DNA
agctgcctgaatctccctga

SEQ ID NO: 1962 - DNA, 20 bp, synthetic construct
  misc_feature 1..20: note = Description of Artificial Sequence: Syntheticoligonucleotide
  source 1..20: mol_type = other DNA
gtccccaccatctccactct

SEQ ID NO: 1963 - DNA, 20 bp, synthetic construct
  misc_feature 1..20: note = Description of Artificial Sequence: Syntheticoligonucleotide
  source 1..20: mol_type = other DNA
tccccaccatctccactctg

SEQ ID NO: 1964 - DNA, 20 bp, synthetic construct
  misc_feature 1..20: note = Description of Artificial Sequence: Syntheticoligonucleotide
  source 1..20: mol_type = other DNA
ccagagcccatggggcagag

SEQ ID NO: 1965 - DNA, 20 bp, synthetic construct
  misc_feature 1..20: note = Description of Artificial Sequence: Syntheticoligonucleotide
  source 1..20: mol_type = other DNA
gccagagcccatggggcaga

SEQ ID NO: 1966 - DNA, 20 bp, synthetic construct
  misc_feature 1..20: note = Description of Artificial Sequence: Syntheticoligonucleotide
  source 1..20: mol_type = other DNA
cagcctcagagatttgccag

SEQ ID NO: 1967 - DNA, 20 bp, synthetic construct
  misc_feature 1..20: note = Description of Artificial Sequence: Syntheticoligonucleotide
  source 1..20: mol_type = other DNA
ggaggccgtggacagtgaat

SEQ ID NO: 1968 - DNA, 20 bp, synthetic construct
  misc_feature 1..20: note = Description of Artificial Sequence: Syntheticoligonucleotide
  source 1..20: mol_type = other DNA
actgtccacggcctcccaac

SEQ ID NO: 1969 - DNA, 20 bp, synthetic construct
  misc_feature 1..20: note = Description of Artificial Sequence: Syntheticoligonucleotide
  source 1..20: mol_type = other DNA
gctccatcagccactgacct

SEQ ID NO: 1970 - DNA, 20 bp, synthetic construct
  misc_feature 1..20: note = Description of Artificial Sequence: Syntheticoligonucleotide
  source 1..20: mol_type = other DNA
aggcatgctgggcaggtcag

SEQ ID NO: 1971 - DNA, 20 bp, synthetic construct
  misc_feature 1..20: note = Description of Artificial Sequence: Syntheticoligonucleotide
  source 1..20: mol_type = other DNA
ctcgggaggtcagggcaggt

SEQ ID NO: 1972 - DNA, 20 bp, synthetic construct
  misc_feature 1..20: note = Description of Artificial Sequence: Syntheticoligonucleotide
  source 1..20: mol_type = other DNA
gctcgggaggtcagggcagg

SEQ ID NO: 1973 - DNA, 20 bp, synthetic construct
  misc_feature 1..20: note = Description of Artificial Sequence: Syntheticoligonucleotide
  source 1..20: mol_type = other DNA
gagacctctccagctgccgg

SEQ ID NO: 1974 - DNA, 20 bp, synthetic construct
  misc_feature 1..20: note = Description of Artificial Sequence: Syntheticoligonucleotide
  source 1..20: mol_type = other DNA
ttggagacctctccagctgc

SEQ ID NO: 1975 - DNA, 20 bp, synthetic construct
  misc_feature 1..20: note = Description of Artificial Sequence: Syntheticoligonucleotide
  source 1..20: mol_type = other DNA
gaagcttgttggagacctct

SEQ ID NO: 1976 - DNA, 20 bp, synthetic construct
  misc_feature 1..20: note = Description of Artificial Sequence: Syntheticoligonucleotide
  source 1..20: mol_type = other DNA
ggaagcttgttggagacctc

SEQ ID NO: 1977 - DNA, 20 bp, synthetic construct
  misc_feature 1..20: note = Description of Artificial Sequence: Syntheticoligonucleotide
  source 1..20: mol_type = other DNA
tggaagcttgttggagacct

SEQ ID NO: 1978 - DNA, 20 bp, synthetic construct
  misc_feature 1..20: note = Description of Artificial Sequence: Syntheticoligonucleotide
  source 1..20: mol_type = other DNA
taccgctcactgcaggacac

SEQ ID NO: 1979 - DNA, 20 bp, synthetic construct
  misc_feature 1..20: note = Description of Artificial Sequence: Syntheticoligonucleotide
  source 1..20: mol_type = other DNA
ctgctgctcctctccagcct

SEQ ID NO: 1980 - DNA, 20 bp, synthetic construct
  misc_feature 1..20: note = Description of Artificial Sequence: Syntheticoligonucleotide
  source 1..20: mol_type = other DNA
ccgctccaggctcttgctgc

SEQ ID NO: 1981 - DNA, 20 bp, synthetic construct
  misc_feature 1..20: note = Description of Artificial Sequence: Syntheticoligonucleotide
  source 1..20: mol_type = other DNA
tgcccagtccggggtggcca

SEQ ID NO: 1982 - DNA, 20 bp, synthetic construct
  misc_feature 1..20: note = Description of Artificial Sequence: Syntheticoligonucleotide
  source 1..20: mol_type = other DNA
ggccagctgccgttctgccc

SEQ ID NO: 1983 - DNA, 20 bp, synthetic construct
  misc_feature 1..20: note = Description of Artificial Sequence: Syntheticoligonucleotide
  source 1..20: mol_type = other DNA
gcagccaacagcacctcagc

SEQ ID NO: 1984 - DNA, 20 bp, synthetic construct
  misc_feature 1..20: note = Description of Artificial Sequence: Syntheticoligonucleotide
  source 1..20: mol_type = other DNA
gctgccaaggagcaccggcg

SEQ ID NO: 1985 - DNA, 20 bp, synthetic construct
  misc_feature 1..20: note = Description of Artificial Sequence: Syntheticoligonucleotide
  source 1..20: mol_type = other DNA
cccagcacagcaatcactcg

SEQ ID NO: 1986 - DNA, 20 bp, synthetic construct
  misc_feature 1..20: note = Description of Artificial Sequence: Syntheticoligonucleotide
  source 1..20: mol_type = other DNA
gcccagcacagcaatcactc

SEQ ID NO: 1987 - DNA, 20 bp, synthetic construct
  misc_feature 1..20: note = Description of Artificial Sequence: Syntheticoligonucleotide
  source 1..20: mol_type = other DNA
ctgtgctgggcaaagctggt

SEQ ID NO: 1988 - DNA, 20 bp, synthetic construct
  misc_feature 1..20: note = Description of Artificial Sequence: Syntheticoligonucleotide
  source 1..20: mol_type = other DNA
ccctgaccagctttgcccag

SEQ ID NO: 1989 - DNA, 20 bp, synthetic construct
  misc_feature 1..20: note = Description of Artificial Sequence: Syntheticoligonucleotide
  source 1..20: mol_type = other DNA
ggctggggcagtgagccggg

SEQ ID NO: 1990 - DNA, 20 bp, synthetic construct
  misc_feature 1..20: note = Description of Artificial Sequence: Syntheticoligonucleotide
  source 1..20: mol_type = other DNA
tggccggcttccccagtacg

SEQ ID NO: 1991 - DNA, 20 bp, synthetic construct
  misc_feature 1..20: note = Description of Artificial Sequence: Syntheticoligonucleotide
  source 1..20: mol_type = other DNA
cccagtacgactttgtcttc

SEQ ID NO: 1992 - DNA, 20 bp, synthetic construct
  misc_feature 1..20: note = Description of Artificial Sequence: Syntheticoligonucleotide
  source 1..20: mol_type = other DNA
gtcttctctgtcccctgcca

SEQ ID NO: 1993 - DNA, 20 bp, synthetic construct
  misc_feature 1..20: note = Description of Artificial Sequence: Syntheticoligonucleotide
  source 1..20: mol_type = other DNA
tcttctctgtcccctgccat

SEQ ID NO: 1994 - DNA, 20 bp, synthetic construct
  misc_feature 1..20: note = Description of Artificial Sequence: Syntheticoligonucleotide
  source 1..20: mol_type = other DNA
tctgtcccctgccattgctt

SEQ ID NO: 1995 - DNA, 20 bp, synthetic construct
  misc_feature 1..20: note = Description of Artificial Sequence: Syntheticoligonucleotide
  source 1..20: mol_type = other DNA
aagcaatggcaggggacaga

SEQ ID NO: 1996 - DNA, 20 bp, synthetic construct
  misc_feature 1..20: note = Description of Artificial Sequence: Syntheticoligonucleotide
  source 1..20: mol_type = other DNA
cttgaaccgtccgggggatg

SEQ ID NO: 1997 - DNA, 20 bp, synthetic construct
  misc_feature 1..20: note = Description of Artificial Sequence: Syntheticoligonucleotide
  source 1..20: mol_type = other DNA
aaccgtccgggggatgccta

SEQ ID NO: 1998 - DNA, 20 bp, synthetic construct
  misc_feature 1..20: note = Description of Artificial Sequence: Syntheticoligonucleotide
  source 1..20: mol_type = other DNA
tccctgggcccacagccact

SEQ ID NO: 1999 - DNA, 20 bp, synthetic construct
  misc_feature 1..20: note = Description of Artificial Sequence: Syntheticoligonucleotide
  source 1..20: mol_type = other DNA
aagatgtggctgaaaacctc

SEQ ID NO: 2000 - DNA, 20 bp, synthetic construct
  misc_feature 1..20: note = Description of Artificial Sequence: Syntheticoligonucleotide
  source 1..20: mol_type = other DNA
tcagccacatcttgaagaga

SEQ ID NO: 2001 - DNA, 20 bp, synthetic construct
  misc_feature 1..20: note = Description of Artificial Sequence: Syntheticoligonucleotide
  source 1..20: mol_type = other DNA
cagccacatcttgaagagac

SEQ ID NO: 2002 - DNA, 20 bp, synthetic construct
  misc_feature 1..20: note = Description of Artificial Sequence: Syntheticoligonucleotide
  source 1..20: mol_type = other DNA
agccacatcttgaagagacc

SEQ ID NO: 2003 - DNA, 20 bp, synthetic construct
  misc_feature 1..20: note = Description of Artificial Sequence: Syntheticoligonucleotide
  source 1..20: mol_type = other DNA
aagagacctgaccgcgttct

SEQ ID NO: 2004 - DNA, 20 bp, synthetic construct
  misc_feature 1..20: note = Description of Artificial Sequence: Syntheticoligonucleotide
  source 1..20: mol_type = other DNA
tgctcatcctagacggcttc

SEQ ID NO: 2005 - DNA, 20 bp, synthetic construct
  misc_feature 1..20: note = Description of Artificial Sequence: Syntheticoligonucleotide
  source 1..20: mol_type = other DNA
cagctcctcgaagccgtcta

SEQ ID NO: 2006 - DNA, 20 bp, synthetic construct
  misc_feature 1..20: note = Description of Artificial Sequence: Syntheticoligonucleotide
  source 1..20: mol_type = other DNA
cgcttccagctcctcgaagc

SEQ ID NO: 2007 - DNA, 20 bp, synthetic construct
  misc_feature 1..20: note = Description of Artificial Sequence: Syntheticoligonucleotide
  source 1..20: mol_type = other DNA
gaggagctggaagcgcaaga

SEQ ID NO: 2008 - DNA, 20 bp, synthetic construct
  misc_feature 1..20: note = Description of Artificial Sequence: Syntheticoligonucleotide
  source 1..20: mol_type = other DNA
ctgcacagcacgtgcggacc

SEQ ID NO: 2009 - DNA, 20 bp, synthetic construct
  misc_feature 1..20: note = Description of Artificial Sequence: Syntheticoligonucleotide
  source 1..20: mol_type = other DNA
tggaaaaggccggccagcag

SEQ ID NO: 2010 - DNA, 20 bp, synthetic construct
  misc_feature 1..20: note = Description of Artificial Sequence: Syntheticoligonucleotide
  source 1..20: mol_type = other DNA
ttctggaaaaggccggccag

SEQ ID NO: 2011 - DNA, 20 bp, synthetic construct
  misc_feature 1..20: note = Description of Artificial Sequence: Syntheticoligonucleotide
  source 1..20: mol_type = other DNA
tccagaagaagctgctccga

SEQ ID NO: 2012 - DNA, 20 bp, synthetic construct
  misc_feature 1..20: note = Description of Artificial Sequence: Syntheticoligonucleotide
  source 1..20: mol_type = other DNA
ccagaagaagctgctccgag

SEQ ID NO: 2013 - DNA, 20 bp, synthetic construct
  misc_feature 1..20: note = Description of Artificial Sequence: Syntheticoligonucleotide
  source 1..20: mol_type = other DNA
cagaagaagctgctccgagg

SEQ ID NO: 2014 - DNA, 20 bp, synthetic construct
  misc_feature 1..20: note = Description of Artificial Sequence: Syntheticoligonucleotide
  source 1..20: mol_type = other DNA
caccctcctcctcacagccc

SEQ ID NO: 2015 - DNA, 20 bp, synthetic construct
  misc_feature 1..20: note = Description of Artificial Sequence: Syntheticoligonucleotide
  source 1..20: mol_type = other DNA
ctcaggctctggaccaggcg

SEQ ID NO: 2016 - DNA, 20 bp, synthetic construct
  misc_feature 1..20: note = Description of Artificial Sequence: Syntheticoligonucleotide
  source 1..20: mol_type = other DNA
gagctgtccggcttctccat

SEQ ID NO: 2017 - DNA, 20 bp, synthetic construct
  misc_feature 1..20: note = Description of Artificial Sequence: Syntheticoligonucleotide
  source 1..20: mol_type = other DNA
agctgtccggcttctccatg

SEQ ID NO: 2018 - DNA, 20 bp, synthetic construct
  misc_feature 1..20: note = Description of Artificial Sequence: Syntheticoligonucleotide
  source 1..20: mol_type = other DNA
tccatggagcaggcccaggc

SEQ ID NO: 2019 - DNA, 20 bp, synthetic construct
  misc_feature 1..20: note = Description of Artificial Sequence: Syntheticoligonucleotide
  source 1..20: mol_type = other DNA
gagagctcagggatgacaga

SEQ ID NO: 2020 - DNA, 20 bp, synthetic construct
  misc_feature 1..20: note = Description of Artificial Sequence: Syntheticoligonucleotide
  source 1..20: mol_type = other DNA
agagctcagggatgacagag

SEQ ID NO: 2021 - DNA, 20 bp, synthetic construct
  misc_feature 1..20: note = Description of Artificial Sequence: Syntheticoligonucleotide
  source 1..20: mol_type = other DNA
gtgctctgtcatccctgagc

SEQ ID NO: 2022 - DNA, 20 bp, synthetic construct
  misc_feature 1..20: note = Description of Artificial Sequence: Syntheticoligonucleotide
  source 1..20: mol_type = other DNA
ttctcagtcacagccacagc

SEQ ID NO: 2023 - DNA, 20 bp, synthetic construct
  misc_feature 1..20: note = Description of Artificial Sequence: Syntheticoligonucleotide
  source 1..20: mol_type = other DNA
tcagtcacagccacagccct

SEQ ID NO: 2024 - DNA, 20 bp, synthetic construct
  misc_feature 1..20: note = Description of Artificial Sequence: Syntheticoligonucleotide
  source 1..20: mol_type = other DNA
gtgccgggcagtgtgccagc

SEQ ID NO: 2025 - DNA, 20 bp, synthetic construct
  misc_feature 1..20: note = Description of Artificial Sequence: Syntheticoligonucleotide
  source 1..20: mol_type = other DNA
tgccgggcagtgtgccagct

SEQ ID NO: 2026 - DNA, 20 bp, synthetic construct
  misc_feature 1..20: note = Description of Artificial Sequence: Syntheticoligonucleotide
  source 1..20: mol_type = other DNA
gcgtcctccccaagctccag

SEQ ID NO: 2027 - DNA, 20 bp, synthetic construct
  misc_feature 1..20: note = Description of Artificial Sequence: Syntheticoligonucleotide
  source 1..20: mol_type = other DNA
gggaggacgccaagctgccc

SEQ ID NO: 2028 - DNA, 20 bp, synthetic construct
  misc_feature 1..20: note = Description of Artificial Sequence: Syntheticoligonucleotide
  source 1..20: mol_type = other DNA
gccagctctgccagggcccc

SEQ ID NO: 2029 - DNA, 20 bp, synthetic construct
  misc_feature 1..20: note = Description of Artificial Sequence: Syntheticoligonucleotide
  source 1..20: mol_type = other DNA
atgtctgcggcccagctccc

SEQ ID NO: 2030 - DNA, 20 bp, synthetic construct
  misc_feature 1..20: note = Description of Artificial Sequence: Syntheticoligonucleotide
  source 1..20: mol_type = other DNA
gatgtctgcggcccagctcc

SEQ ID NO: 2031 - DNA, 20 bp, synthetic construct
  misc_feature 1..20: note = Description of Artificial Sequence: Syntheticoligonucleotide
  source 1..20: mol_type = other DNA
ccatccgcagacgtgaggac

SEQ ID NO: 2032 - DNA, 20 bp, synthetic construct
  misc_feature 1..20: note = Description of Artificial Sequence: Syntheticoligonucleotide
  source 1..20: mol_type = other DNA
gccatcgcccaggtcctcac

SEQ ID NO: 2033 - DNA, 20 bp, synthetic construct
  misc_feature 1..20: note = Description of Artificial Sequence: Syntheticoligonucleotide
  source 1..20: mol_type = other DNA
ggccatcgcccaggtcctca

SEQ ID NO: 2034 - DNA, 20 bp, synthetic construct
  misc_feature 1..20: note = Description of Artificial Sequence: Syntheticoligonucleotide
  source 1..20: mol_type = other DNA
gactaagcctttggccatcg

SEQ ID NO: 2035 - DNA, 20 bp, synthetic construct
  misc_feature 1..20: note = Description of Artificial Sequence: Syntheticoligonucleotide
  source 1..20: mol_type = other DNA
gtccaacacccaccgcgggc

SEQ ID NO: 2036 - DNA, 20 bp, synthetic construct
  misc_feature 1..20: note = Description of Artificial Sequence: Syntheticoligonucleotide
  source 1..20: mol_type = other DNA
caggaggaagctggggaagg

SEQ ID NO: 2037 - DNA, 20 bp, synthetic construct
  misc_feature 1..20: note = Description of Artificial Sequence: Syntheticoligonucleotide
  source 1..20: mol_type = other DNA
cccagcttcctcctgcaatg

SEQ ID NO: 2038 - DNA, 20 bp, synthetic construct
  misc_feature 1..20: note = Description of Artificial Sequence: Syntheticoligonucleotide
  source 1..20: mol_type = other DNA
ctcctgcaatgcttcctggg

SEQ ID NO: 2039 - DNA, 20 bp, synthetic construct
  misc_feature 1..20: note = Description of Artificial Sequence: Syntheticoligonucleotide
  source 1..20: mol_type = other DNA
ctgggggccctgtggctggc

SEQ ID NO: 2040 - DNA, 20 bp, synthetic construct
  misc_feature 1..20: note = Description of Artificial Sequence: Syntheticoligonucleotide
  source 1..20: mol_type = other DNA
gccactcagagccagccaca

SEQ ID NO: 2041 - DNA, 20 bp, synthetic construct
  misc_feature 1..20: note = Description of Artificial Sequence: Syntheticoligonucleotide
  source 1..20: mol_type = other DNA
cgccactcagagccagccac

SEQ ID NO: 2042 - DNA, 20 bp, synthetic construct
  misc_feature 1..20: note = Description of Artificial Sequence: Syntheticoligonucleotide
  source 1..20: mol_type = other DNA
atttcgccactcagagccag

SEQ ID NO: 2043 - DNA, 20 bp, synthetic construct
  misc_feature 1..20: note = Description of Artificial Sequence: Syntheticoligonucleotide
  source 1..20: mol_type = other DNA
tccttgatttcgccactcag

SEQ ID NO: 2044 - DNA, 20 bp, synthetic construct
  misc_feature 1..20: note = Description of Artificial Sequence: Syntheticoligonucleotide
  source 1..20: mol_type = other DNA
gggtcaatgctaggtactgc

SEQ ID NO: 2045 - DNA, 20 bp, synthetic construct
  misc_feature 1..20: note = Description of Artificial Sequence: Syntheticoligonucleotide
  source 1..20: mol_type = other DNA
cttggggtcaatgctaggta

SEQ ID NO: 2046 - DNA, 20 bp, synthetic construct
  misc_feature 1..20: note = Description of Artificial Sequence: Syntheticoligonucleotide
  source 1..20: mol_type = other DNA
ttccttggggtcaatgctag

SEQ ID NO: 2047 - RNA, 20 nt, synthetic construct
  misc_feature 1..20: note = Description of Artificial Sequence: Syntheticoligonucleotide
  source 1..20: mol_type = other RNA
accccaaggaagaagaggcc

SEQ ID NO: 2048 - DNA, 20 bp, synthetic construct
  misc_feature 1..20: note = Description of Artificial Sequence: Syntheticoligonucleotide
  source 1..20: mol_type = other DNA
tcatagggcctcttcttcct

SEQ ID NO: 2049 - DNA, 20 bp, synthetic construct
  misc_feature 1..20: note = Description of Artificial Sequence: Syntheticoligonucleotide
  source 1..20: mol_type = other DNA
ctggctgggctgatcttcca

SEQ ID NO: 2050 - DNA, 20 bp, synthetic construct
  misc_feature 1..20: note = Description of Artificial Sequence: Syntheticoligonucleotide
  source 1..20: mol_type = other DNA
tggctgggctgatcttccag

SEQ ID NO: 2051 - DNA, 20 bp, synthetic construct
  misc_feature 1..20: note = Description of Artificial Sequence: Syntheticoligonucleotide
  source 1..20: mol_type = other DNA
cagcctcccgcccgctgcct

SEQ ID NO: 2052 - DNA, 20 bp, synthetic construct
  misc_feature 1..20: note = Description of Artificial Sequence: Syntheticoligonucleotide
  source 1..20: mol_type = other DNA
ctgtccaccgaggcagccgc

SEQ ID NO: 2053 - DNA, 20 bp, synthetic construct
  misc_feature 1..20: note = Description of Artificial Sequence: Syntheticoligonucleotide
  source 1..20: mol_type = other DNA
tgcttcctgtccaccgaggc

SEQ ID NO: 2054 - DNA, 20 bp, synthetic construct
  misc_feature 1..20: note = Description of Artificial Sequence: Syntheticoligonucleotide
  source 1..20: mol_type = other DNA
aggtacctcgcaagcacctt

SEQ ID NO: 2055 - DNA, 20 bp, synthetic construct
  misc_feature 1..20: note = Description of Artificial Sequence: Syntheticoligonucleotide
  source 1..20: mol_type = other DNA
cgaggtacctgaagcggctg

SEQ ID NO: 2056 - DNA, 20 bp, synthetic construct
  misc_feature 1..20: note = Description of Artificial Sequence: Syntheticoligonucleotide
  source 1..20: mol_type = other DNA
cagcctcctcggcctcgtgg

SEQ ID NO: 2057 - DNA, 20 bp, synthetic construct
  misc_feature 1..20: note = Description of Artificial Sequence: Syntheticoligonucleotide
  source 1..20: mol_type = other DNA
ggcagcacgtggtacaggag

SEQ ID NO: 2058 - DNA, 20 bp, synthetic construct
  misc_feature 1..20: note = Description of Artificial Sequence: Syntheticoligonucleotide
  source 1..20: mol_type = other DNA
gcagcacgtggtacaggagc

SEQ ID NO: 2059 - DNA, 20 bp, synthetic construct
  misc_feature 1..20: note = Description of Artificial Sequence: Syntheticoligonucleotide
  source 1..20: mol_type = other DNA
tctgggcacccgcctcacgc

SEQ ID NO: 2060 - DNA, 20 bp, synthetic construct
  misc_feature 1..20: note = Description of Artificial Sequence: Syntheticoligonucleotide
  source 1..20: mol_type = other DNA
ctgggcacccgcctcacgcc

SEQ ID NO: 2061 - DNA, 20 bp, synthetic construct
  misc_feature 1..20: note = Description of Artificial Sequence: Syntheticoligonucleotide
  source 1..20: mol_type = other DNA
tgggcacccgcctcacgcct

SEQ ID NO: 2062 - DNA, 20 bp, synthetic construct
  misc_feature 1..20: note = Description of Artificial Sequence: Syntheticoligonucleotide
  source 1..20: mol_type = other DNA
cccagtacatgtgcatcagg

SEQ ID NO: 2063 - DNA, 20 bp, synthetic construct
  misc_feature 1..20: note = Description of Artificial Sequence: Syntheticoligonucleotide
  source 1..20: mol_type = other DNA
gcccgccgcctccaaggcct

SEQ ID NO: 2064 - DNA, 20 bp, synthetic construct
  misc_feature 1..20: note = Description of Artificial Sequence: Syntheticoligonucleotide
  source 1..20: mol_type = other DNA
gaggcggcgggccaagactt

SEQ ID NO: 2065 - DNA, 20 bp, synthetic construct
  misc_feature 1..20: note = Description of Artificial Sequence: Syntheticoligonucleotide
  source 1..20: mol_type = other DNA
tccctggacctccgcagcac

SEQ ID NO: 2066 - DNA, 20 bp, synthetic construct
  misc_feature 1..20: note = Description of Artificial Sequence: Syntheticoligonucleotide
  source 1..20: mol_type = other DNA
gcccctctggattggggagc

SEQ ID NO: 2067 - DNA, 20 bp, synthetic construct
  misc_feature 1..20: note = Description of Artificial Sequence: Syntheticoligonucleotide
  source 1..20: mol_type = other DNA
cccctctggattggggagcc

SEQ ID NO: 2068 - DNA, 20 bp, synthetic construct
  misc_feature 1..20: note = Description of Artificial Sequence: Syntheticoligonucleotide
  source 1..20: mol_type = other DNA
gggagcctcgtgggactcag

SEQ ID NO: 2069 - DNA, 20 bp, synthetic construct
  misc_feature 1..20: note = Description of Artificial Sequence: Syntheticoligonucleotide
  source 1..20: mol_type = other DNA
gtctccccatgctgctgcag

SEQ ID NO: 2070 - DNA, 20 bp, synthetic construct
  misc_feature 1..20: note = Description of Artificial Sequence: Syntheticoligonucleotide
  source 1..20: mol_type = other DNA
tcctctgctgcctgaagtag

SEQ ID NO: 2071 - DNA, 20 bp, synthetic construct
  misc_feature 1..20: note = Description of Artificial Sequence: Syntheticoligonucleotide
  source 1..20: mol_type = other DNA
aggcagcagaggagaagttc

SEQ ID NO: 2072 - DNA, 20 bp, synthetic construct
  misc_feature 1..20: note = Description of Artificial Sequence: Syntheticoligonucleotide
  source 1..20: mol_type = other DNA
aaaggctcgatggtgaactt

SEQ ID NO: 2073 - DNA, 20 bp, synthetic construct
  misc_feature 1..20: note = Description of Artificial Sequence: Syntheticoligonucleotide
  source 1..20: mol_type = other DNA
gaaaggctcgatggtgaact

SEQ ID NO: 2074 - DNA, 20 bp, synthetic construct
  misc_feature 1..20: note = Description of Artificial Sequence: Syntheticoligonucleotide
  source 1..20: mol_type = other DNA
accatcgagcctttcaaagc

SEQ ID NO: 2075 - DNA, 20 bp, synthetic construct
  misc_feature 1..20: note = Description of Artificial Sequence: Syntheticoligonucleotide
  source 1..20: mol_type = other DNA
gctttgaaaggctcgatggt

SEQ ID NO: 2076 - DNA, 20 bp, synthetic construct
  misc_feature 1..20: note = Description of Artificial Sequence: Syntheticoligonucleotide
  source 1..20: mol_type = other DNA
agggacttggctttgaaagg

SEQ ID NO: 2077 - DNA, 20 bp, synthetic construct
  misc_feature 1..20: note = Description of Artificial Sequence: Syntheticoligonucleotide
  source 1..20: mol_type = other DNA
caaagccaagtccctgaagg

SEQ ID NO: 2078 - DNA, 20 bp, synthetic construct
  misc_feature 1..20: note = Description of Artificial Sequence: Syntheticoligonucleotide
  source 1..20: mol_type = other DNA
aaagccaagtccctgaagga

SEQ ID NO: 2079 - DNA, 20 bp, synthetic construct
  misc_feature 1..20: note = Description of Artificial Sequence: Syntheticoligonucleotide
  source 1..20: mol_type = other DNA
cacatccttcagggacttgg

SEQ ID NO: 2080 - DNA, 20 bp, synthetic construct
  misc_feature 1..20: note = Description of Artificial Sequence: Syntheticoligonucleotide
  source 1..20: mol_type = other DNA
ccaggtcttccacatccttc

SEQ ID NO: 2081 - DNA, 20 bp, synthetic construct
  misc_feature 1..20: note = Description of Artificial Sequence: Syntheticoligonucleotide
  source 1..20: mol_type = other DNA
cccaggtcttccacatcctt

SEQ ID NO: 2082 - DNA, 20 bp, synthetic construct
  misc_feature 1..20: note = Description of Artificial Sequence: Syntheticoligonucleotide
  source 1..20: mol_type = other DNA
ctcggaagacacagctgggg

SEQ ID NO: 2083 - DNA, 20 bp, synthetic construct
  misc_feature 1..20: note = Description of Artificial Sequence: Syntheticoligonucleotide
  source 1..20: mol_type = other DNA
ggtcccgaacagcagggagc

SEQ ID NO: 2084 - DNA, 20 bp, synthetic construct
  misc_feature 1..20: note = Description of Artificial Sequence: Syntheticoligonucleotide
  source 1..20: mol_type = other DNA
aggtcccgaacagcagggag

SEQ ID NO: 2085 - DNA, 20 bp, synthetic construct
  misc_feature 1..20: note = Description of Artificial Sequence: Syntheticoligonucleotide
  source 1..20: mol_type = other DNA
tttaggtcccgaacagcagg

SEQ ID NO: 2086 - DNA, 20 bp, synthetic construct
  misc_feature 1..20: note = Description of Artificial Sequence: Syntheticoligonucleotide
  source 1..20: mol_type = other DNA
ctttaggtcccgaacagcag

SEQ ID NO: 2087 - DNA, 20 bp, synthetic construct
  misc_feature 1..20: note = Description of Artificial Sequence: Syntheticoligonucleotide
  source 1..20: mol_type = other DNA
gggacctaaagaaactggag

SEQ ID NO: 2088 - DNA, 20 bp, synthetic construct
  misc_feature 1..20: note = Description of Artificial Sequence: Syntheticoligonucleotide
  source 1..20: mol_type = other DNA
gggaaagcctgggggcctga

SEQ ID NO: 2089 - DNA, 20 bp, synthetic construct
  misc_feature 1..20: note = Description of Artificial Sequence: Syntheticoligonucleotide
  source 1..20: mol_type = other DNA
ggggaaagcctgggggcctg

SEQ ID NO: 2090 - DNA, 20 bp, synthetic construct
  misc_feature 1..20: note = Description of Artificial Sequence: Syntheticoligonucleotide
  source 1..20: mol_type = other DNA
ccccaaactggtgcggatcc

SEQ ID NO: 2091 - DNA, 20 bp, synthetic construct
  misc_feature 1..20: note = Description of Artificial Sequence: Syntheticoligonucleotide
  source 1..20: mol_type = other DNA
cccaaactggtgcggatcct

SEQ ID NO: 2092 - DNA, 20 bp, synthetic construct
  misc_feature 1..20: note = Description of Artificial Sequence: Syntheticoligonucleotide
  source 1..20: mol_type = other DNA
ttctcactcagcgcatccag

SEQ ID NO: 2093 - DNA, 20 bp, synthetic construct
  misc_feature 1..20: note = Description of Artificial Sequence: Syntheticoligonucleotide
  source 1..20: mol_type = other DNA
agctgggggaaggtggctga

SEQ ID NO: 2094 - DNA, 20 bp, synthetic construct
  misc_feature 1..20: note = Description of Artificial Sequence: Syntheticoligonucleotide
  source 1..20: mol_type = other DNA
ccccagctgaagtccttgga

SEQ ID NO: 2095 - DNA, 20 bp, synthetic construct
  misc_feature 1..20: note = Description of Artificial Sequence: Syntheticoligonucleotide
  source 1..20: mol_type = other DNA
caaggacttcagctggggga

SEQ ID NO: 2096 - DNA, 20 bp, synthetic construct
  misc_feature 1..20: note = Description of Artificial Sequence: Syntheticoligonucleotide
  source 1..20: mol_type = other DNA
ccaaggacttcagctggggg

SEQ ID NO: 2097 - DNA, 20 bp, synthetic construct
  misc_feature 1..20: note = Description of Artificial Sequence: Syntheticoligonucleotide
  source 1..20: mol_type = other DNA
agggtttccaaggacttcag

SEQ ID NO: 2098 - DNA, 20 bp, synthetic construct
  misc_feature 1..20: note = Description of Artificial Sequence: Syntheticoligonucleotide
  source 1..20: mol_type = other DNA
taggcacccaggtcagtgat

SEQ ID NO: 2099 - DNA, 20 bp, synthetic construct
  misc_feature 1..20: note = Description of Artificial Sequence: Syntheticoligonucleotide
  source 1..20: mol_type = other DNA
gtaggcacccaggtcagtga

SEQ ID NO: 2100 - DNA, 20 bp, synthetic construct
  misc_feature 1..20: note = Description of Artificial Sequence: Syntheticoligonucleotide
  source 1..20: mol_type = other DNA
gctcgctgcatccctgctca

SEQ ID NO: 2101 - DNA, 20 bp, synthetic construct
  misc_feature 1..20: note = Description of Artificial Sequence: Syntheticoligonucleotide
  source 1..20: mol_type = other DNA
gcctgagcagggatgcagcg

SEQ ID NO: 2102 - DNA, 20 bp, synthetic construct
  misc_feature 1..20: note = Description of Artificial Sequence: Syntheticoligonucleotide
  source 1..20: mol_type = other DNA
tacaataactgcatctgcga

SEQ ID NO: 2103 - DNA, 20 bp, synthetic construct
  misc_feature 1..20: note = Description of Artificial Sequence: Syntheticoligonucleotide
  source 1..20: mol_type = other DNA
gctcgtgtgcttccggacat

SEQ ID NO: 2104 - DNA, 20 bp, synthetic construct
  misc_feature 1..20: note = Description of Artificial Sequence: Syntheticoligonucleotide
  source 1..20: mol_type = other DNA
cggacatggtgtccctccgg

SEQ ID NO: 2105 - DNA, 20 bp, synthetic construct
  misc_feature 1..20: note = Description of Artificial Sequence: Syntheticoligonucleotide
  source 1..20: mol_type = other DNA
acggctgccggggcccagca

SEQ ID NO: 2106 - DNA, 20 bp, synthetic construct
  misc_feature 1..20: note = Description of Artificial Sequence: Syntheticoligonucleotide
  source 1..20: mol_type = other DNA
ggaggtgtcctcatgtggag

SEQ ID NO: 2107 - DNA, 20 bp, synthetic construct
  misc_feature 1..20: note = Description of Artificial Sequence: Syntheticoligonucleotide
  source 1..20: mol_type = other DNA
ctggacactgaatgggatgg

SEQ ID NO: 2108 - DNA, 20 bp, synthetic construct
  misc_feature 1..20: note = Description of Artificial Sequence: Syntheticoligonucleotide
  source 1..20: mol_type = other DNA
agtgtccaggaacacctgca

SEQ ID NO: 2109 - DNA, 20 bp, synthetic construct
  misc_feature 1..20: note = Description of Artificial Sequence: Syntheticoligonucleotide
  source 1..20: mol_type = other DNA
caggtgttcctggacactga

SEQ ID NO: 2110 - DNA, 20 bp, synthetic construct
  misc_feature 1..20: note = Description of Artificial Sequence: Syntheticoligonucleotide
  source 1..20: mol_type = other DNA
ttgcaggtgttcctggacac

SEQ ID NO: 2111 - DNA, 20 bp, synthetic construct
  misc_feature 1..20: note = Description of Artificial Sequence: Syntheticoligonucleotide
  source 1..20: mol_type = other DNA
acggatcagcctgagatgat

SEQ ID NO: 2112 - RNA, 56 nt, synthetic construct
  misc_feature 1..56: note = Description of Artificial Sequence: Syntheticoligonucleotide
  source 1..56: mol_type = other RNA
ctttcaagactaatagattgctccttacgaggagacagcaggctgttgtgtgacat

SEQ ID NO: 2113 - RNA, 56 nt, synthetic construct
  misc_feature 1..56: note = Description of Artificial Sequence: Syntheticoligonucleotide
  source 1..56: mol_type = other RNA
ctttcaagactaatagattgctccttacgaggagaccatgtcacacaacagcctgc

SEQ ID NO: 2114 - RNA, 56 nt, synthetic construct
  misc_feature 1..56: note = Description of Artificial Sequence: Syntheticoligonucleotide
  source 1..56: mol_type = other RNA
ctttcaagactaatagattgctccttacgaggagactgtgacatggaaggtgatga

SEQ ID NO: 2115 - RNA, 56 nt, synthetic construct
  misc_feature 1..56: note = Description of Artificial Sequence: Syntheticoligonucleotide
  source 1..56: mol_type = other RNA
ctttcaagactaatagattgctccttacgaggagacatcaccttccatgtcacaca

SEQ ID NO: 2116 - RNA, 56 nt, synthetic construct
  misc_feature 1..56: note = Description of Artificial Sequence: Syntheticoligonucleotide
  source 1..56: mol_type = other RNA
ctttcaagactaatagattgctccttacgaggagacgcataagcctccctggtctc

SEQ ID NO: 2117 - RNA, 56 nt, synthetic construct
  misc_feature 1..56: note = Description of Artificial Sequence: Syntheticoligonucleotide
  source 1..56: mol_type = other RNA
ctttcaagactaatagattgctccttacgaggagaccaggactcccagctggaggg

SEQ ID NO: 2118 - RNA, 56 nt, synthetic construct
  misc_feature 1..56: note = Description of Artificial Sequence: Syntheticoligonucleotide
  source 1..56: mol_type = other RNA
ctttcaagactaatagattgctccttacgaggagacctcaggccctccagctggga

SEQ ID NO: 2119 - RNA, 56 nt, synthetic construct
  misc_feature 1..56: note = Description of Artificial Sequence: Syntheticoligonucleotide
  source 1..56: mol_type = other RNA
ctttcaagactaatagattgctccttacgaggagactgctggcatctccatactct

SEQ ID NO: 2120 - RNA, 56 nt, synthetic construct
  misc_feature 1..56: note = Description of Artificial Sequence: Syntheticoligonucleotide
  source 1..56: mol_type = other RNA
ctttcaagactaatagattgctccttacgaggagactgcccaacttctgctggcat

SEQ ID NO: 2121 - RNA, 56 nt, synthetic construct
  misc_feature 1..56: note = Description of Artificial Sequence: Syntheticoligonucleotide
  source 1..56: mol_type = other RNA
ctttcaagactaatagattgctccttacgaggagacctgcccaacttctgctggca

SEQ ID NO: 2122 - RNA, 56 nt, synthetic construct
  misc_feature 1..56: note = Description of Artificial Sequence: Syntheticoligonucleotide
  source 1..56: mol_type = other RNA
ctttcaagactaatagattgctccttacgaggagactctgcccaacttctgctggc

SEQ ID NO: 2123 - RNA, 56 nt, synthetic construct
  misc_feature 1..56: note = Description of Artificial Sequence: Syntheticoligonucleotide
  source 1..56: mol_type = other RNA
ctttcaagactaatagattgctccttacgaggagactgacttttctgcccaacttc

SEQ ID NO: 2124 - RNA, 56 nt, synthetic construct
  misc_feature 1..56: note = Description of Artificial Sequence: Syntheticoligonucleotide
  source 1..56: mol_type = other RNA
ctttcaagactaatagattgctccttacgaggagacctgacttttctgcccaactt

SEQ ID NO: 2125 - RNA, 56 nt, synthetic construct
  misc_feature 1..56: note = Description of Artificial Sequence: Syntheticoligonucleotide
  source 1..56: mol_type = other RNA
ctttcaagactaatagattgctccttacgaggagactctgacttttctgcccaact

SEQ ID NO: 2126 - RNA, 56 nt, synthetic construct
  misc_feature 1..56: note = Description of Artificial Sequence: Syntheticoligonucleotide
  source 1..56: mol_type = other RNA
ctttcaagactaatagattgctccttacgaggagacccagaggagcttccggcaga

SEQ ID NO: 2127 - RNA, 56 nt, synthetic construct
  misc_feature 1..56: note = Description of Artificial Sequence: Syntheticoligonucleotide
  source 1..56: mol_type = other RNA
ctttcaagactaatagattgctccttacgaggagacaggtctgccggaagctcctc

SEQ ID NO: 2128 - RNA, 56 nt, synthetic construct
  misc_feature 1..56: note = Description of Artificial Sequence: Syntheticoligonucleotide
  source 1..56: mol_type = other RNA
ctttcaagactaatagattgctccttacgaggagaccggcagacctgaagcactgg

SEQ ID NO: 2129 - RNA, 56 nt, synthetic construct
  misc_feature 1..56: note = Description of Artificial Sequence: Syntheticoligonucleotide
  source 1..56: mol_type = other RNA
ctttcaagactaatagattgctccttacgaggagaccagtgcttcaggtctgccgg

SEQ ID NO: 2130 - RNA, 56 nt, synthetic construct
  misc_feature 1..56: note = Description of Artificial Sequence: Syntheticoligonucleotide
  source 1..56: mol_type = other RNA
ctttcaagactaatagattgctccttacgaggagacaacagcgcaggcagtggcag

SEQ ID NO: 2131 - RNA, 56 nt, synthetic construct
  misc_feature 1..56: note = Description of Artificial Sequence: Syntheticoligonucleotide
  source 1..56: mol_type = other RNA
ctttcaagactaatagattgctccttacgaggagacaaccaggagccagcctccgg

SEQ ID NO: 2132 - RNA, 56 nt, synthetic construct
  misc_feature 1..56: note = Description of Artificial Sequence: Syntheticoligonucleotide
  source 1..56: mol_type = other RNA
ctttcaagactaatagattgctccttacgaggagactccaggcgcatctggccgga

SEQ ID NO: 2133 - RNA, 56 nt, synthetic construct
  misc_feature 1..56: note = Description of Artificial Sequence: Syntheticoligonucleotide
  source 1..56: mol_type = other RNA
ctttcaagactaatagattgctccttacgaggagacctccaggcgcatctggccgg

SEQ ID NO: 2134 - RNA, 56 nt, synthetic construct
  misc_feature 1..56: note = Description of Artificial Sequence: Syntheticoligonucleotide
  source 1..56: mol_type = other RNA
ctttcaagactaatagattgctccttacgaggagactctccaggcgcatctggccg

SEQ ID NO: 2135 - RNA, 56 nt, synthetic construct
  misc_feature 1..56: note = Description of Artificial Sequence: Syntheticoligonucleotide
  source 1..56: mol_type = other RNA
ctttcaagactaatagattgctccttacgaggagacctccagttcctcgttgagct

SEQ ID NO: 2136 - RNA, 56 nt, synthetic construct
  misc_feature 1..56: note = Description of Artificial Sequence: Syntheticoligonucleotide
  source 1..56: mol_type = other RNA
ctttcaagactaatagattgctccttacgaggagactccagttcctcgttgagctg

SEQ ID NO: 2137 - RNA, 56 nt, synthetic construct
  misc_feature 1..56: note = Description of Artificial Sequence: Syntheticoligonucleotide
  source 1..56: mol_type = other RNA
ctttcaagactaatagattgctccttacgaggagacaggcagctcaacgaggaact

SEQ ID NO: 2138 - RNA, 56 nt, synthetic construct
  misc_feature 1..56: note = Description of Artificial Sequence: Syntheticoligonucleotide
  source 1..56: mol_type = other RNA
ctttcaagactaatagattgctccttacgaggagacctcgttgagctgcctgaatc

SEQ ID NO: 2139 - RNA, 56 nt, synthetic construct
  misc_feature 1..56: note = Description of Artificial Sequence: Syntheticoligonucleotide
  source 1..56: mol_type = other RNA
ctttcaagactaatagattgctccttacgaggagacagctgcctgaatctccctga

SEQ ID NO: 2140 - RNA, 56 nt, synthetic construct
  misc_feature 1..56: note = Description of Artificial Sequence: Syntheticoligonucleotide
  source 1..56: mol_type = other RNA
ctttcaagactaatagattgctccttacgaggagacgtccccaccatctccactct

SEQ ID NO: 2141 - RNA, 56 nt, synthetic construct
  misc_feature 1..56: note = Description of Artificial Sequence: Syntheticoligonucleotide
  source 1..56: mol_type = other RNA
ctttcaagactaatagattgctccttacgaggagactccccaccatctccactctg

SEQ ID NO: 2142 - RNA, 56 nt, synthetic construct
  misc_feature 1..56: note = Description of Artificial Sequence: Syntheticoligonucleotide
  source 1..56: mol_type = other RNA
ctttcaagactaatagattgctccttacgaggagacccagagcccatggggcagag

SEQ ID NO: 2143 - RNA, 56 nt, synthetic construct
  misc_feature 1..56: note = Description of Artificial Sequence: Syntheticoligonucleotide
  source 1..56: mol_type = other RNA
ctttcaagactaatagattgctccttacgaggagacgccagagcccatggggcaga

SEQ ID NO: 2144 - RNA, 56 nt, synthetic construct
  misc_feature 1..56: note = Description of Artificial Sequence: Syntheticoligonucleotide
  source 1..56: mol_type = other RNA
ctttcaagactaatagattgctccttacgaggagaccagcctcagagatttgccag

SEQ ID NO: 2145 - RNA, 56 nt, synthetic construct
  misc_feature 1..56: note = Description of Artificial Sequence: Syntheticoligonucleotide
  source 1..56: mol_type = other RNA
ctttcaagactaatagattgctccttacgaggagacggaggccgtggacagtgaat

SEQ ID NO: 2146 - RNA, 56 nt, synthetic construct
  misc_feature 1..56: note = Description of Artificial Sequence: Syntheticoligonucleotide
  source 1..56: mol_type = other RNA
ctttcaagactaatagattgctccttacgaggagacactgtccacggcctcccaac

SEQ ID NO: 2147 - RNA, 56 nt, synthetic construct
  misc_feature 1..56: note = Description of Artificial Sequence: Syntheticoligonucleotide
  source 1..56: mol_type = other RNA
ctttcaagactaatagattgctccttacgaggagacgctccatcagccactgacct

SEQ ID NO: 2148 - RNA, 56 nt, synthetic construct
  misc_feature 1..56: note = Description of Artificial Sequence: Syntheticoligonucleotide
  source 1..56: mol_type = other RNA
ctttcaagactaatagattgctccttacgaggagacaggcatgctgggcaggtcag

SEQ ID NO: 2149 - RNA, 56 nt, synthetic construct
  misc_feature 1..56: note = Description of Artificial Sequence: Syntheticoligonucleotide
  source 1..56: mol_type = other RNA
ctttcaagactaatagattgctccttacgaggagacctcgggaggtcagggcaggt

SEQ ID NO: 2150 - RNA, 56 nt, synthetic construct
  misc_feature 1..56: note = Description of Artificial Sequence: Syntheticoligonucleotide
  source 1..56: mol_type = other RNA
ctttcaagactaatagattgctccttacgaggagacgctcgggaggtcagggcagg

SEQ ID NO: 2151 - RNA, 56 nt, synthetic construct
  misc_feature 1..56: note = Description of Artificial Sequence: Syntheticoligonucleotide
  source 1..56: mol_type = other RNA
ctttcaagactaatagattgctccttacgaggagacgagacctctccagctgccgg

SEQ ID NO: 2152 - RNA, 56 nt, synthetic construct
  misc_feature 1..56: note = Description of Artificial Sequence: Syntheticoligonucleotide
  source 1..56: mol_type = other RNA
ctttcaagactaatagattgctccttacgaggagacttggagacctctccagctgc

SEQ ID NO: 2153 - RNA, 56 nt, synthetic construct
  misc_feature 1..56: note = Description of Artificial Sequence: Syntheticoligonucleotide
  source 1..56: mol_type = other RNA
ctttcaagactaatagattgctccttacgaggagacgaagcttgttggagacctct

SEQ ID NO: 2154 - RNA, 56 nt, synthetic construct
  misc_feature 1..56: note = Description of Artificial Sequence: Syntheticoligonucleotide
  source 1..56: mol_type = other RNA
ctttcaagactaatagattgctccttacgaggagacggaagcttgttggagacctc

SEQ ID NO: 2155 - RNA, 56 nt, synthetic construct
  misc_feature 1..56: note = Description of Artificial Sequence: Syntheticoligonucleotide
  source 1..56: mol_type = other RNA
ctttcaagactaatagattgctccttacgaggagactggaagcttgttggagacct

SEQ ID NO: 2156 - RNA, 56 nt, synthetic construct
  misc_feature 1..56: note = Description of Artificial Sequence: Syntheticoligonucleotide
  source 1..56: mol_type = other RNA
ctttcaagactaatagattgctccttacgaggagactaccgctcactgcaggacac

SEQ ID NO: 2157 - RNA, 56 nt, synthetic construct
  misc_feature 1..56: note = Description of Artificial Sequence: Syntheticoligonucleotide
  source 1..56: mol_type = other RNA
ctttcaagactaatagattgctccttacgaggagacctgctgctcctctccagcct

SEQ ID NO: 2158 - RNA, 56 nt, synthetic construct
  misc_feature 1..56: note = Description of Artificial Sequence: Syntheticoligonucleotide
  source 1..56: mol_type = other RNA
ctttcaagactaatagattgctccttacgaggagacccgctccaggctcttgctgc

SEQ ID NO: 2159 - RNA, 56 nt, synthetic construct
  misc_feature 1..56: note = Description of Artificial Sequence: Syntheticoligonucleotide
  source 1..56: mol_type = other RNA
ctttcaagactaatagattgctccttacgaggagactgcccagtccggggtggcca

SEQ ID NO: 2160 - RNA, 56 nt, synthetic construct
  misc_feature 1..56: note = Description of Artificial Sequence: Syntheticoligonucleotide
  source 1..56: mol_type = other RNA
ctttcaagactaatagattgctccttacgaggagacggccagctgccgttctgccc

SEQ ID NO: 2161 - RNA, 56 nt, synthetic construct
  misc_feature 1..56: note = Description of Artificial Sequence: Syntheticoligonucleotide
  source 1..56: mol_type = other RNA
ctttcaagactaatagattgctccttacgaggagacgcagccaacagcacctcagc

SEQ ID NO: 2162 - RNA, 56 nt, synthetic construct
  misc_feature 1..56: note = Description of Artificial Sequence: Syntheticoligonucleotide
  source 1..56: mol_type = other RNA
ctttcaagactaatagattgctccttacgaggagacgctgccaaggagcaccggcg

SEQ ID NO: 2163 - RNA, 56 nt, synthetic construct
  misc_feature 1..56: note = Description of Artificial Sequence: Syntheticoligonucleotide
  source 1..56: mol_type = other RNA
ctttcaagactaatagattgctccttacgaggagaccccagcacagcaatcactcg

SEQ ID NO: 2164 - RNA, 56 nt, synthetic construct
  misc_feature 1..56: note = Description of Artificial Sequence: Syntheticoligonucleotide
  source 1..56: mol_type = other RNA
ctttcaagactaatagattgctccttacgaggagacgcccagcacagcaatcactc

SEQ ID NO: 2165 - RNA, 56 nt, synthetic construct
  misc_feature 1..56: note = Description of Artificial Sequence: Syntheticoligonucleotide
  source 1..56: mol_type = other RNA
ctttcaagactaatagattgctccttacgaggagacctgtgctgggcaaagctggt

SEQ ID NO: 2166 - RNA, 56 nt, synthetic construct
  misc_feature 1..56: note = Description of Artificial Sequence: Syntheticoligonucleotide
  source 1..56: mol_type = other RNA
ctttcaagactaatagattgctccttacgaggagacccctgaccagctttgcccag

SEQ ID NO: 2167 - RNA, 56 nt, synthetic construct
  misc_feature 1..56: note = Description of Artificial Sequence: Syntheticoligonucleotide
  source 1..56: mol_type = other RNA
ctttcaagactaatagattgctccttacgaggagacggctggggcagtgagccggg

SEQ ID NO: 2168 - RNA, 56 nt, synthetic construct
  misc_feature 1..56: note = Description of Artificial Sequence: Syntheticoligonucleotide
  source 1..56: mol_type = other RNA
ctttcaagactaatagattgctccttacgaggagactggccggcttccccagtacg

SEQ ID NO: 2169 - RNA, 56 nt, synthetic construct
  misc_feature 1..56: note = Description of Artificial Sequence: Syntheticoligonucleotide
  source 1..56: mol_type = other RNA
ctttcaagactaatagattgctccttacgaggagaccccagtacgactttgtcttc

SEQ ID NO: 2170 - RNA, 56 nt, synthetic construct
  misc_feature 1..56: note = Description of Artificial Sequence: Syntheticoligonucleotide
  source 1..56: mol_type = other RNA
ctttcaagactaatagattgctccttacgaggagacgtcttctctgtcccctgcca

SEQ ID NO: 2171 - RNA, 56 nt, synthetic construct
  misc_feature 1..56: note = Description of Artificial Sequence: Syntheticoligonucleotide
  source 1..56: mol_type = other RNA
ctttcaagactaatagattgctccttacgaggagactcttctctgtcccctgccat

SEQ ID NO: 2172 - RNA, 56 nt, synthetic construct
  misc_feature 1..56: note = Description of Artificial Sequence: Syntheticoligonucleotide
  source 1..56: mol_type = other RNA
ctttcaagactaatagattgctccttacgaggagactctgtcccctgccattgctt

SEQ ID NO: 2173 - RNA, 56 nt, synthetic construct
  misc_feature 1..56: note = Description of Artificial Sequence: Syntheticoligonucleotide
  source 1..56: mol_type = other RNA
ctttcaagactaatagattgctccttacgaggagacaagcaatggcaggggacaga

SEQ ID NO: 2174 - RNA, 56 nt, synthetic construct
  misc_feature 1..56: note = Description of Artificial Sequence: Syntheticoligonucleotide
  source 1..56: mol_type = other RNA
ctttcaagactaatagattgctccttacgaggagaccttgaaccgtccgggggatg

SEQ ID NO: 2175 - RNA, 56 nt, synthetic construct
  misc_feature 1..56: note = Description of Artificial Sequence: Syntheticoligonucleotide
  source 1..56: mol_type = other RNA
ctttcaagactaatagattgctccttacgaggagacaaccgtccgggggatgccta

SEQ ID NO: 2176 - RNA, 56 nt, synthetic construct
  misc_feature 1..56: note = Description of Artificial Sequence: Syntheticoligonucleotide
  source 1..56: mol_type = other RNA
ctttcaagactaatagattgctccttacgaggagactccctgggcccacagccact

SEQ ID NO: 2177 - RNA, 56 nt, synthetic construct
  misc_feature 1..56: note = Description of Artificial Sequence: Syntheticoligonucleotide
  source 1..56: mol_type = other RNA
ctttcaagactaatagattgctccttacgaggagacaagatgtggctgaaaacctc

SEQ ID NO: 2178 - RNA, 56 nt, synthetic construct
  misc_feature 1..56: note = Description of Artificial Sequence: Syntheticoligonucleotide
  source 1..56: mol_type = other RNA
ctttcaagactaatagattgctccttacgaggagactcagccacatcttgaagaga

SEQ ID NO: 2179 - RNA, 56 nt, synthetic construct
  misc_feature 1..56: note = Description of Artificial Sequence: Syntheticoligonucleotide
  source 1..56: mol_type = other RNA
ctttcaagactaatagattgctccttacgaggagaccagccacatcttgaagagac

SEQ ID NO: 2180 - RNA, 56 nt, synthetic construct
  misc_feature 1..56: note = Description of Artificial Sequence: Syntheticoligonucleotide
  source 1..56: mol_type = other RNA
ctttcaagactaatagattgctccttacgaggagacagccacatcttgaagagacc

SEQ ID NO: 2181 - RNA, 56 nt, synthetic construct
  misc_feature 1..56: note = Description of Artificial Sequence: Syntheticoligonucleotide
  source 1..56: mol_type = other RNA
ctttcaagactaatagattgctccttacgaggagacaagagacctgaccgcgttct

SEQ ID NO: 2182 - RNA, 56 nt, synthetic construct
  misc_feature 1..56: note = Description of Artificial Sequence: Syntheticoligonucleotide
  source 1..56: mol_type = other RNA
ctttcaagactaatagattgctccttacgaggagactgctcatcctagacggcttc

SEQ ID NO: 2183 - RNA, 56 nt, synthetic construct
  misc_feature 1..56: note = Description of Artificial Sequence: Syntheticoligonucleotide
  source 1..56: mol_type = other RNA
ctttcaagactaatagattgctccttacgaggagaccagctcctcgaagccgtcta

SEQ ID NO: 2184 - RNA, 56 nt, synthetic construct
  misc_feature 1..56: note = Description of Artificial Sequence: Syntheticoligonucleotide
  source 1..56: mol_type = other RNA
ctttcaagactaatagattgctccttacgaggagaccgcttccagctcctcgaagc

SEQ ID NO: 2185 - RNA, 56 nt, synthetic construct
  misc_feature 1..56: note = Description of Artificial Sequence: Syntheticoligonucleotide
  source 1..56: mol_type = other RNA
ctttcaagactaatagattgctccttacgaggagacgaggagctggaagcgcaaga

SEQ ID NO: 2186 - RNA, 56 nt, synthetic construct
  misc_feature 1..56: note = Description of Artificial Sequence: Syntheticoligonucleotide
  source 1..56: mol_type = other RNA
ctttcaagactaatagattgctccttacgaggagacctgcacagcacgtgcggacc

SEQ ID NO: 2187 - RNA, 56 nt, synthetic construct
  misc_feature 1..56: note = Description of Artificial Sequence: Syntheticoligonucleotide
  source 1..56: mol_type = other RNA
ctttcaagactaatagattgctccttacgaggagactggaaaaggccggccagcag

SEQ ID NO: 2188 - RNA, 56 nt, synthetic construct
  misc_feature 1..56: note = Description of Artificial Sequence: Syntheticoligonucleotide
  source 1..56: mol_type = other RNA
ctttcaagactaatagattgctccttacgaggagacttctggaaaaggccggccag

SEQ ID NO: 2189 - RNA, 56 nt, synthetic construct
  misc_feature 1..56: note = Description of Artificial Sequence: Syntheticoligonucleotide
  source 1..56: mol_type = other RNA
ctttcaagactaatagattgctccttacgaggagactccagaagaagctgctccga

SEQ ID NO: 2190 - RNA, 56 nt, synthetic construct
  misc_feature 1..56: note = Description of Artificial Sequence: Syntheticoligonucleotide
  source 1..56: mol_type = other RNA
ctttcaagactaatagattgctccttacgaggagacccagaagaagctgctccgag

SEQ ID NO: 2191 - RNA, 56 nt, synthetic construct
  misc_feature 1..56: note = Description of Artificial Sequence: Syntheticoligonucleotide
  source 1..56: mol_type = other RNA
ctttcaagactaatagattgctccttacgaggagaccagaagaagctgctccgagg

SEQ ID NO: 2192 - RNA, 56 nt, synthetic construct
  misc_feature 1..56: note = Description of Artificial Sequence: Syntheticoligonucleotide
  source 1..56: mol_type = other RNA
ctttcaagactaatagattgctccttacgaggagaccaccctcctcctcacagccc

SEQ ID NO: 2193 - RNA, 56 nt, synthetic construct
  misc_feature 1..56: note = Description of Artificial Sequence: Syntheticoligonucleotide
  source 1..56: mol_type = other RNA
ctttcaagactaatagattgctccttacgaggagacctcaggctctggaccaggcg

SEQ ID NO: 2194 - RNA, 56 nt, synthetic construct
  misc_feature 1..56: note = Description of Artificial Sequence: Syntheticoligonucleotide
  source 1..56: mol_type = other RNA
ctttcaagactaatagattgctccttacgaggagacgagctgtccggcttctccat

SEQ ID NO: 2195 - RNA, 56 nt, synthetic construct
  misc_feature 1..56: note = Description of Artificial Sequence: Syntheticoligonucleotide
  source 1..56: mol_type = other RNA
ctttcaagactaatagattgctccttacgaggagacagctgtccggcttctccatg

SEQ ID NO: 2196 - RNA, 56 nt, synthetic construct
  misc_feature 1..56: note = Description of Artificial Sequence: Syntheticoligonucleotide
  source 1..56: mol_type = other RNA
ctttcaagactaatagattgctccttacgaggagactccatggagcaggcccaggc

SEQ ID NO: 2197 - RNA, 56 nt, synthetic construct
  misc_feature 1..56: note = Description of Artificial Sequence: Syntheticoligonucleotide
  source 1..56: mol_type = other RNA
ctttcaagactaatagattgctccttacgaggagacgagagctcagggatgacaga

SEQ ID NO: 2198 - RNA, 56 nt, synthetic construct
  misc_feature 1..56: note = Description of Artificial Sequence: Syntheticoligonucleotide
  source 1..56: mol_type = other RNA
ctttcaagactaatagattgctccttacgaggagacagagctcagggatgacagag

SEQ ID NO: 2199 - RNA, 56 nt, synthetic construct
  misc_feature 1..56: note = Description of Artificial Sequence: Syntheticoligonucleotide
  source 1..56: mol_type = other RNA
ctttcaagactaatagattgctccttacgaggagacgtgctctgtcatccctgagc

SEQ ID NO: 2200 - RNA, 56 nt, synthetic construct
  misc_feature 1..56: note = Description of Artificial Sequence: Syntheticoligonucleotide
  source 1..56: mol_type = other RNA
ctttcaagactaatagattgctccttacgaggagacttctcagtcacagccacagc

SEQ ID NO: 2201 - RNA, 56 nt, synthetic construct
  misc_feature 1..56: note = Description of Artificial Sequence: Syntheticoligonucleotide
  source 1..56: mol_type = other RNA
ctttcaagactaatagattgctccttacgaggagactcagtcacagccacagccct

SEQ ID NO: 2202 - RNA, 56 nt, synthetic construct
  misc_feature 1..56: note = Description of Artificial Sequence: Syntheticoligonucleotide
  source 1..56: mol_type = other RNA
ctttcaagactaatagattgctccttacgaggagacgtgccgggcagtgtgccagc

SEQ ID NO: 2203 - RNA, 56 nt, synthetic construct
  misc_feature 1..56: note = Description of Artificial Sequence: Syntheticoligonucleotide
  source 1..56: mol_type = other RNA
ctttcaagactaatagattgctccttacgaggagactgccgggcagtgtgccagct

SEQ ID NO: 2204 - RNA, 56 nt, synthetic construct
  misc_feature 1..56: note = Description of Artificial Sequence: Syntheticoligonucleotide
  source 1..56: mol_type = other RNA
ctttcaagactaatagattgctccttacgaggagacgcgtcctccccaagctccag

SEQ ID NO: 2205 - RNA, 56 nt, synthetic construct
  misc_feature 1..56: note = Description of Artificial Sequence: Syntheticoligonucleotide
  source 1..56: mol_type = other RNA
ctttcaagactaatagattgctccttacgaggagacgggaggacgccaagctgccc

SEQ ID NO: 2206 - RNA, 56 nt, synthetic construct
  misc_feature 1..56: note = Description of Artificial Sequence: Syntheticoligonucleotide
  source 1..56: mol_type = other RNA
ctttcaagactaatagattgctccttacgaggagacgccagctctgccagggcccc

SEQ ID NO: 2207 - RNA, 56 nt, synthetic construct
  misc_feature 1..56: note = Description of Artificial Sequence: Syntheticoligonucleotide
  source 1..56: mol_type = other RNA
ctttcaagactaatagattgctccttacgaggagacatgtctgcggcccagctccc

SEQ ID NO: 2208 - RNA, 56 nt, synthetic construct
  misc_feature 1..56: note = Description of Artificial Sequence: Syntheticoligonucleotide
  source 1..56: mol_type = other RNA
ctttcaagactaatagattgctccttacgaggagacgatgtctgcggcccagctcc

SEQ ID NO: 2209 - RNA, 56 nt, synthetic construct
  misc_feature 1..56: note = Description of Artificial Sequence: Syntheticoligonucleotide
  source 1..56: mol_type = other RNA
ctttcaagactaatagattgctccttacgaggagacccatccgcagacgtgaggac

SEQ ID NO: 2210 - RNA, 56 nt, synthetic construct
  misc_feature 1..56: note = Description of Artificial Sequence: Syntheticoligonucleotide
  source 1..56: mol_type = other RNA
ctttcaagactaatagattgctccttacgaggagacgccatcgcccaggtcctcac

SEQ ID NO: 2211 - RNA, 56 nt, synthetic construct
  misc_feature 1..56: note = Description of Artificial Sequence: Syntheticoligonucleotide
  source 1..56: mol_type = other RNA
ctttcaagactaatagattgctccttacgaggagacggccatcgcccaggtcctca

SEQ ID NO: 2212 - RNA, 56 nt, synthetic construct
  misc_feature 1..56: note = Description of Artificial Sequence: Syntheticoligonucleotide
  source 1..56: mol_type = other RNA
ctttcaagactaatagattgctccttacgaggagacgactaagcctttggccatcg

SEQ ID NO: 2213 - RNA, 56 nt, synthetic construct
  misc_feature 1..56: note = Description of Artificial Sequence: Syntheticoligonucleotide
  source 1..56: mol_type = other RNA
ctttcaagactaatagattgctccttacgaggagacgtccaacacccaccgcgggc

SEQ ID NO: 2214 - RNA, 56 nt, synthetic construct
  misc_feature 1..56: note = Description of Artificial Sequence: Syntheticoligonucleotide
  source 1..56: mol_type = other RNA
ctttcaagactaatagattgctccttacgaggagaccaggaggaagctggggaagg

SEQ ID NO: 2215 - RNA, 56 nt, synthetic construct
  misc_feature 1..56: note = Description of Artificial Sequence: Syntheticoligonucleotide
  source 1..56: mol_type = other RNA
ctttcaagactaatagattgctccttacgaggagaccccagcttcctcctgcaatg

SEQ ID NO: 2216 - RNA, 56 nt, synthetic construct
  misc_feature 1..56: note = Description of Artificial Sequence: Syntheticoligonucleotide
  source 1..56: mol_type = other RNA
ctttcaagactaatagattgctccttacgaggagacctcctgcaatgcttcctggg

SEQ ID NO: 2217 - RNA, 56 nt, synthetic construct
  misc_feature 1..56: note = Description of Artificial Sequence: Syntheticoligonucleotide
  source 1..56: mol_type = other RNA
ctttcaagactaatagattgctccttacgaggagacctgggggccctgtggctggc

SEQ ID NO: 2218 - RNA, 56 nt, synthetic construct
  misc_feature 1..56: note = Description of Artificial Sequence: Syntheticoligonucleotide
  source 1..56: mol_type = other RNA
ctttcaagactaatagattgctccttacgaggagacgccactcagagccagccaca

SEQ ID NO: 2219 - RNA, 56 nt, synthetic construct
  misc_feature 1..56: note = Description of Artificial Sequence: Syntheticoligonucleotide
  source 1..56: mol_type = other RNA
ctttcaagactaatagattgctccttacgaggagaccgccactcagagccagccac

SEQ ID NO: 2220 - RNA, 56 nt, synthetic construct
  misc_feature 1..56: note = Description of Artificial Sequence: Syntheticoligonucleotide
  source 1..56: mol_type = other RNA
ctttcaagactaatagattgctccttacgaggagacatttcgccactcagagccag

SEQ ID NO: 2221 - RNA, 56 nt, synthetic construct
  misc_feature 1..56: note = Description of Artificial Sequence: Syntheticoligonucleotide
  source 1..56: mol_type = other RNA
ctttcaagactaatagattgctccttacgaggagactccttgatttcgccactcag

SEQ ID NO: 2222 - RNA, 56 nt, synthetic construct
  misc_feature 1..56: note = Description of Artificial Sequence: Syntheticoligonucleotide
  source 1..56: mol_type = other RNA
ctttcaagactaatagattgctccttacgaggagacgggtcaatgctaggtactgc

SEQ ID NO: 2223 - RNA, 56 nt, synthetic construct
  misc_feature 1..56: note = Description of Artificial Sequence: Syntheticoligonucleotide
  source 1..56: mol_type = other RNA
ctttcaagactaatagattgctccttacgaggagaccttggggtcaatgctaggta

SEQ ID NO: 2224 - RNA, 56 nt, synthetic construct
  misc_feature 1..56: note = Description of Artificial Sequence: Syntheticoligonucleotide
  source 1..56: mol_type = other RNA
ctttcaagactaatagattgctccttacgaggagacttccttggggtcaatgctag

SEQ ID NO: 2225 - RNA, 56 nt, synthetic construct
  misc_feature 1..56: note = Description of Artificial Sequence: Syntheticoligonucleotide
  source 1..56: mol_type = other RNA
ctttcaagactaatagattgctccttacgaggagacaccccaaggaagaagaggcc

SEQ ID NO: 2226 - RNA, 56 nt, synthetic construct
  misc_feature 1..56: note = Description of Artificial Sequence: Syntheticoligonucleotide
  source 1..56: mol_type = other RNA
ctttcaagactaatagattgctccttacgaggagactcatagggcctcttcttcct

SEQ ID NO: 2227 - RNA, 56 nt, synthetic construct
  misc_feature 1..56: note = Description of Artificial Sequence: Syntheticoligonucleotide
  source 1..56: mol_type = other RNA
ctttcaagactaatagattgctccttacgaggagacctggctgggctgatcttcca

SEQ ID NO: 2228 - RNA, 56 nt, synthetic construct
  misc_feature 1..56: note = Description of Artificial Sequence: Syntheticoligonucleotide
  source 1..56: mol_type = other RNA
ctttcaagactaatagattgctccttacgaggagactggctgggctgatcttccag

SEQ ID NO: 2229 - RNA, 56 nt, synthetic construct
  misc_feature 1..56: note = Description of Artificial Sequence: Syntheticoligonucleotide
  source 1..56: mol_type = other RNA
ctttcaagactaatagattgctccttacgaggagaccagcctcccgcccgctgcct

SEQ ID NO: 2230 - RNA, 56 nt, synthetic construct
  misc_feature 1..56: note = Description of Artificial Sequence: Syntheticoligonucleotide
  source 1..56: mol_type = other RNA
ctttcaagactaatagattgctccttacgaggagacctgtccaccgaggcagccgc

SEQ ID NO: 2231 - RNA, 56 nt, synthetic construct
  misc_feature 1..56: note = Description of Artificial Sequence: Syntheticoligonucleotide
  source 1..56: mol_type = other RNA
ctttcaagactaatagattgctccttacgaggagactgcttcctgtccaccgaggc

SEQ ID NO: 2232 - RNA, 56 nt, synthetic construct
  misc_feature 1..56: note = Description of Artificial Sequence: Syntheticoligonucleotide
  source 1..56: mol_type = other RNA
ctttcaagactaatagattgctccttacgaggagacaggtacctcgcaagcacctt

SEQ ID NO: 2233 - RNA, 56 nt, synthetic construct
  misc_feature 1..56: note = Description of Artificial Sequence: Syntheticoligonucleotide
  source 1..56: mol_type = other RNA
ctttcaagactaatagattgctccttacgaggagaccgaggtacctgaagcggctg

SEQ ID NO: 2234 - RNA, 56 nt, synthetic construct
  misc_feature 1..56: note = Description of Artificial Sequence: Syntheticoligonucleotide
  source 1..56: mol_type = other RNA
ctttcaagactaatagattgctccttacgaggagaccagcctcctcggcctcgtgg

SEQ ID NO: 2235 - RNA, 56 nt, synthetic construct
  misc_feature 1..56: note = Description of Artificial Sequence: Syntheticoligonucleotide
  source 1..56: mol_type = other RNA
ctttcaagactaatagattgctccttacgaggagacggcagcacgtggtacaggag

SEQ ID NO: 2236 - RNA, 56 nt, synthetic construct
  misc_feature 1..56: note = Description of Artificial Sequence: Syntheticoligonucleotide
  source 1..56: mol_type = other RNA
ctttcaagactaatagattgctccttacgaggagacgcagcacgtggtacaggagc

SEQ ID NO: 2237 - RNA, 56 nt, synthetic construct
  misc_feature 1..56: note = Description of Artificial Sequence: Syntheticoligonucleotide
  source 1..56: mol_type = other RNA
ctttcaagactaatagattgctccttacgaggagactctgggcacccgcctcacgc

SEQ ID NO: 2238 - RNA, 56 nt, synthetic construct
  misc_feature 1..56: note = Description of Artificial Sequence: Syntheticoligonucleotide
  source 1..56: mol_type = other RNA
ctttcaagactaatagattgctccttacgaggagacctgggcacccgcctcacgcc

SEQ ID NO: 2239 - RNA, 56 nt, synthetic construct
  misc_feature 1..56: note = Description of Artificial Sequence: Syntheticoligonucleotide
  source 1..56: mol_type = other RNA
ctttcaagactaatagattgctccttacgaggagactgggcacccgcctcacgcct

SEQ ID NO: 2240 - RNA, 56 nt, synthetic construct
  misc_feature 1..56: note = Description of Artificial Sequence: Syntheticoligonucleotide
  source 1..56: mol_type = other RNA
ctttcaagactaatagattgctccttacgaggagaccccagtacatgtgcatcagg

SEQ ID NO: 2241 - RNA, 56 nt, synthetic construct
  misc_feature 1..56: note = Description of Artificial Sequence: Syntheticoligonucleotide
  source 1..56: mol_type = other RNA
ctttcaagactaatagattgctccttacgaggagacgcccgccgcctccaaggcct

SEQ ID NO: 2242 - RNA, 56 nt, synthetic construct
  misc_feature 1..56: note = Description of Artificial Sequence: Syntheticoligonucleotide
  source 1..56: mol_type = other RNA
ctttcaagactaatagattgctccttacgaggagacgaggcggcgggccaagactt

SEQ ID NO: 2243 - RNA, 56 nt, synthetic construct
  misc_feature 1..56: note = Description of Artificial Sequence: Syntheticoligonucleotide
  source 1..56: mol_type = other RNA
ctttcaagactaatagattgctccttacgaggagactccctggacctccgcagcac

SEQ ID NO: 2244 - RNA, 56 nt, synthetic construct
  misc_feature 1..56: note = Description of Artificial Sequence: Syntheticoligonucleotide
  source 1..56: mol_type = other RNA
ctttcaagactaatagattgctccttacgaggagacgcccctctggattggggagc

SEQ ID NO: 2245 - RNA, 56 nt, synthetic construct
  misc_feature 1..56: note = Description of Artificial Sequence: Syntheticoligonucleotide
  source 1..56: mol_type = other RNA
ctttcaagactaatagattgctccttacgaggagaccccctctggattggggagcc

SEQ ID NO: 2246 - RNA, 56 nt, synthetic construct
  misc_feature 1..56: note = Description of Artificial Sequence: Syntheticoligonucleotide
  source 1..56: mol_type = other RNA
ctttcaagactaatagattgctccttacgaggagacgggagcctcgtgggactcag

SEQ ID NO: 2247 - RNA, 56 nt, synthetic construct
  misc_feature 1..56: note = Description of Artificial Sequence: Syntheticoligonucleotide
  source 1..56: mol_type = other RNA
ctttcaagactaatagattgctccttacgaggagacgtctccccatgctgctgcag

SEQ ID NO: 2248 - RNA, 56 nt, synthetic construct
  misc_feature 1..56: note = Description of Artificial Sequence: Syntheticoligonucleotide
  source 1..56: mol_type = other RNA
ctttcaagactaatagattgctccttacgaggagactcctctgctgcctgaagtag

SEQ ID NO: 2249 - RNA, 56 nt, synthetic construct
  misc_feature 1..56: note = Description of Artificial Sequence: Syntheticoligonucleotide
  source 1..56: mol_type = other RNA
ctttcaagactaatagattgctccttacgaggagacaggcagcagaggagaagttc

SEQ ID NO: 2250 - RNA, 56 nt, synthetic construct
  misc_feature 1..56: note = Description of Artificial Sequence: Syntheticoligonucleotide
  source 1..56: mol_type = other RNA
ctttcaagactaatagattgctccttacgaggagacaaaggctcgatggtgaactt

SEQ ID NO: 2251 - RNA, 56 nt, synthetic construct
  misc_feature 1..56: note = Description of Artificial Sequence: Syntheticoligonucleotide
  source 1..56: mol_type = other RNA
ctttcaagactaatagattgctccttacgaggagacgaaaggctcgatggtgaact

SEQ ID NO: 2252 - RNA, 56 nt, synthetic construct
  misc_feature 1..56: note = Description of Artificial Sequence: Syntheticoligonucleotide
  source 1..56: mol_type = other RNA
ctttcaagactaatagattgctccttacgaggagacaccatcgagcctttcaaagc

SEQ ID NO: 2253 - RNA, 56 nt, synthetic construct
  misc_feature 1..56: note = Description of Artificial Sequence: Syntheticoligonucleotide
  source 1..56: mol_type = other RNA
ctttcaagactaatagattgctccttacgaggagacgctttgaaaggctcgatggt

SEQ ID NO: 2254 - RNA, 56 nt, synthetic construct
  misc_feature 1..56: note = Description of Artificial Sequence: Syntheticoligonucleotide
  source 1..56: mol_type = other RNA
ctttcaagactaatagattgctccttacgaggagacagggacttggctttgaaagg

SEQ ID NO: 2255 - RNA, 56 nt, synthetic construct
  misc_feature 1..56: note = Description of Artificial Sequence: Syntheticoligonucleotide
  source 1..56: mol_type = other RNA
ctttcaagactaatagattgctccttacgaggagaccaaagccaagtccctgaagg

SEQ ID NO: 2256 - RNA, 56 nt, synthetic construct
  misc_feature 1..56: note = Description of Artificial Sequence: Syntheticoligonucleotide
  source 1..56: mol_type = other RNA
ctttcaagactaatagattgctccttacgaggagacaaagccaagtccctgaagga

SEQ ID NO: 2257 - RNA, 56 nt, synthetic construct
  misc_feature 1..56: note = Description of Artificial Sequence: Syntheticoligonucleotide
  source 1..56: mol_type = other RNA
ctttcaagactaatagattgctccttacgaggagaccacatccttcagggacttgg

SEQ ID NO: 2258 - RNA, 56 nt, synthetic construct
  misc_feature 1..56: note = Description of Artificial Sequence: Syntheticoligonucleotide
  source 1..56: mol_type = other RNA
ctttcaagactaatagattgctccttacgaggagacccaggtcttccacatccttc

SEQ ID NO: 2259 - RNA, 56 nt, synthetic construct
  misc_feature 1..56: note = Description of Artificial Sequence: Syntheticoligonucleotide
  source 1..56: mol_type = other RNA
ctttcaagactaatagattgctccttacgaggagaccccaggtcttccacatcctt

SEQ ID NO: 2260 - RNA, 56 nt, synthetic construct
  misc_feature 1..56: note = Description of Artificial Sequence: Syntheticoligonucleotide
  source 1..56: mol_type = other RNA
ctttcaagactaatagattgctccttacgaggagacctcggaagacacagctgggg

SEQ ID NO: 2261 - RNA, 56 nt, synthetic construct
  misc_feature 1..56: note = Description of Artificial Sequence: Syntheticoligonucleotide
  source 1..56: mol_type = other RNA
ctttcaagactaatagattgctccttacgaggagacggtcccgaacagcagggagc

SEQ ID NO: 2262 - RNA, 56 nt, synthetic construct
  misc_feature 1..56: note = Description of Artificial Sequence: Syntheticoligonucleotide
  source 1..56: mol_type = other RNA
ctttcaagactaatagattgctccttacgaggagacaggtcccgaacagcagggag

SEQ ID NO: 2263 - RNA, 56 nt, synthetic construct
  misc_feature 1..56: note = Description of Artificial Sequence: Syntheticoligonucleotide
  source 1..56: mol_type = other RNA
ctttcaagactaatagattgctccttacgaggagactttaggtcccgaacagcagg

SEQ ID NO: 2264 - RNA, 56 nt, synthetic construct
  misc_feature 1..56: note = Description of Artificial Sequence: Syntheticoligonucleotide
  source 1..56: mol_type = other RNA
ctttcaagactaatagattgctccttacgaggagacctttaggtcccgaacagcag

SEQ ID NO: 2265 - RNA, 56 nt, synthetic construct
  misc_feature 1..56: note = Description of Artificial Sequence: Syntheticoligonucleotide
  source 1..56: mol_type = other RNA
ctttcaagactaatagattgctccttacgaggagacgggacctaaagaaactggag

SEQ ID NO: 2266 - RNA, 56 nt, synthetic construct
  misc_feature 1..56: note = Description of Artificial Sequence: Syntheticoligonucleotide
  source 1..56: mol_type = other RNA
ctttcaagactaatagattgctccttacgaggagacgggaaagcctgggggcctga

SEQ ID NO: 2267 - RNA, 56 nt, synthetic construct
  misc_feature 1..56: note = Description of Artificial Sequence: Syntheticoligonucleotide
  source 1..56: mol_type = other RNA
ctttcaagactaatagattgctccttacgaggagacggggaaagcctgggggcctg

SEQ ID NO: 2268 - RNA, 56 nt, synthetic construct
  misc_feature 1..56: note = Description of Artificial Sequence: Syntheticoligonucleotide
  source 1..56: mol_type = other RNA
ctttcaagactaatagattgctccttacgaggagacccccaaactggtgcggatcc

SEQ ID NO: 2269 - RNA, 56 nt, synthetic construct
  misc_feature 1..56: note = Description of Artificial Sequence: Syntheticoligonucleotide
  source 1..56: mol_type = other RNA
ctttcaagactaatagattgctccttacgaggagaccccaaactggtgcggatcct

SEQ ID NO: 2270 - RNA, 56 nt, synthetic construct
  misc_feature 1..56: note = Description of Artificial Sequence: Syntheticoligonucleotide
  source 1..56: mol_type = other RNA
ctttcaagactaatagattgctccttacgaggagacttctcactcagcgcatccag

SEQ ID NO: 2271 - RNA, 56 nt, synthetic construct
  misc_feature 1..56: note = Description of Artificial Sequence: Syntheticoligonucleotide
  source 1..56: mol_type = other RNA
ctttcaagactaatagattgctccttacgaggagacagctgggggaaggtggctga

SEQ ID NO: 2272 - RNA, 56 nt, synthetic construct
  misc_feature 1..56: note = Description of Artificial Sequence: Syntheticoligonucleotide
  source 1..56: mol_type = other RNA
ctttcaagactaatagattgctccttacgaggagacccccagctgaagtccttgga

SEQ ID NO: 2273 - RNA, 56 nt, synthetic construct
  misc_feature 1..56: note = Description of Artificial Sequence: Syntheticoligonucleotide
  source 1..56: mol_type = other RNA
ctttcaagactaatagattgctccttacgaggagaccaaggacttcagctggggga

SEQ ID NO: 2274 - RNA, 56 nt, synthetic construct
  misc_feature 1..56: note = Description of Artificial Sequence: Syntheticoligonucleotide
  source 1..56: mol_type = other RNA
ctttcaagactaatagattgctccttacgaggagacccaaggacttcagctggggg

SEQ ID NO: 2275 - RNA, 56 nt, synthetic construct
  misc_feature 1..56: note = Description of Artificial Sequence: Syntheticoligonucleotide
  source 1..56: mol_type = other RNA
ctttcaagactaatagattgctccttacgaggagacagggtttccaaggacttcag

SEQ ID NO: 2276 - RNA, 56 nt, synthetic construct
  misc_feature 1..56: note = Description of Artificial Sequence: Syntheticoligonucleotide
  source 1..56: mol_type = other RNA
ctttcaagactaatagattgctccttacgaggagactaggcacccaggtcagtgat

SEQ ID NO: 2277 - RNA, 56 nt, synthetic construct
  misc_feature 1..56: note = Description of Artificial Sequence: Syntheticoligonucleotide
  source 1..56: mol_type = other RNA
ctttcaagactaatagattgctccttacgaggagacgtaggcacccaggtcagtga

SEQ ID NO: 2278 - RNA, 56 nt, synthetic construct
  misc_feature 1..56: note = Description of Artificial Sequence: Syntheticoligonucleotide
  source 1..56: mol_type = other RNA
ctttcaagactaatagattgctccttacgaggagacgctcgctgcatccctgctca

SEQ ID NO: 2279 - RNA, 56 nt, synthetic construct
  misc_feature 1..56: note = Description of Artificial Sequence: Syntheticoligonucleotide
  source 1..56: mol_type = other RNA
ctttcaagactaatagattgctccttacgaggagacgcctgagcagggatgcagcg

SEQ ID NO: 2280 - RNA, 56 nt, synthetic construct
  misc_feature 1..56: note = Description of Artificial Sequence: Syntheticoligonucleotide
  source 1..56: mol_type = other RNA
ctttcaagactaatagattgctccttacgaggagactacaataactgcatctgcga

SEQ ID NO: 2281 - RNA, 56 nt, synthetic construct
  misc_feature 1..56: note = Description of Artificial Sequence: Syntheticoligonucleotide
  source 1..56: mol_type = other RNA
ctttcaagactaatagattgctccttacgaggagacgctcgtgtgcttccggacat

SEQ ID NO: 2282 - RNA, 56 nt, synthetic construct
  misc_feature 1..56: note = Description of Artificial Sequence: Syntheticoligonucleotide
  source 1..56: mol_type = other RNA
ctttcaagactaatagattgctccttacgaggagaccggacatggtgtccctccgg

SEQ ID NO: 2283 - RNA, 56 nt, synthetic construct
  misc_feature 1..56: note = Description of Artificial Sequence: Syntheticoligonucleotide
  source 1..56: mol_type = other RNA
ctttcaagactaatagattgctccttacgaggagacacggctgccggggcccagca

SEQ ID NO: 2284 - RNA, 56 nt, synthetic construct
  misc_feature 1..56: note = Description of Artificial Sequence: Syntheticoligonucleotide
  source 1..56: mol_type = other RNA
ctttcaagactaatagattgctccttacgaggagacggaggtgtcctcatgtggag

SEQ ID NO: 2285 - RNA, 56 nt, synthetic construct
  misc_feature 1..56: note = Description of Artificial Sequence: Syntheticoligonucleotide
  source 1..56: mol_type = other RNA
ctttcaagactaatagattgctccttacgaggagacctggacactgaatgggatgg

SEQ ID NO: 2286 - RNA, 56 nt, synthetic construct
  misc_feature 1..56: note = Description of Artificial Sequence: Syntheticoligonucleotide
  source 1..56: mol_type = other RNA
ctttcaagactaatagattgctccttacgaggagacagtgtccaggaacacctgca

SEQ ID NO: 2287 - RNA, 56 nt, synthetic construct
  misc_feature 1..56: note = Description of Artificial Sequence: Syntheticoligonucleotide
  source 1..56: mol_type = other RNA
ctttcaagactaatagattgctccttacgaggagaccaggtgttcctggacactga

SEQ ID NO: 2288 - RNA, 56 nt, synthetic construct
  misc_feature 1..56: note = Description of Artificial Sequence: Syntheticoligonucleotide
  source 1..56: mol_type = other RNA
ctttcaagactaatagattgctccttacgaggagacttgcaggtgttcctggacac

SEQ ID NO: 2289 - RNA, 56 nt, synthetic construct
  misc_feature 1..56: note = Description of Artificial Sequence: Syntheticoligonucleotide
  source 1..56: mol_type = other RNA
ctttcaagactaatagattgctccttacgaggagacacggatcagcctgagatgat

SEQ ID NO: 2290 - RNA, 37 nt, synthetic construct
  misc_feature 1..37: note = Description of Artificial Sequence: Syntheticoligonucleotide
  source 1..37: mol_type = other RNA
attgctccttacgaggagacagcaggctgttgtgtga

SEQ ID NO: 2291 - RNA, 37 nt, synthetic construct
  misc_feature 1..37: note = Description of Artificial Sequence: Syntheticoligonucleotide
  source 1..37: mol_type = other RNA
attgctccttacgaggagaccatgtcacacaacagcc

SEQ ID NO: 2292 - RNA, 37 nt, synthetic construct
  misc_feature 1..37: note = Description of Artificial Sequence: Syntheticoligonucleotide
  source 1..37: mol_type = other RNA
attgctccttacgaggagactgtgacatggaaggtga

SEQ ID NO: 2293 - RNA, 37 nt, synthetic construct
  misc_feature 1..37: note = Description of Artificial Sequence: Syntheticoligonucleotide
  source 1..37: mol_type = other RNA
attgctccttacgaggagacatcaccttccatgtcac

SEQ ID NO: 2294 - RNA, 37 nt, synthetic construct
  misc_feature 1..37: note = Description of Artificial Sequence: Syntheticoligonucleotide
  source 1..37: mol_type = other RNA
attgctccttacgaggagacgcataagcctccctggt

SEQ ID NO: 2295 - RNA, 37 nt, synthetic construct
  misc_feature 1..37: note = Description of Artificial Sequence: Syntheticoligonucleotide
  source 1..37: mol_type = other RNA
attgctccttacgaggagaccaggactcccagctgga

SEQ ID NO: 2296 - RNA, 37 nt, synthetic construct
  misc_feature 1..37: note = Description of Artificial Sequence: Syntheticoligonucleotide
  source 1..37: mol_type = other RNA
attgctccttacgaggagacctcaggccctccagctg

SEQ ID NO: 2297 - RNA, 37 nt, synthetic construct
  misc_feature 1..37: note = Description of Artificial Sequence: Syntheticoligonucleotide
  source 1..37: mol_type = other RNA
attgctccttacgaggagactgctggcatctccatac

SEQ ID NO: 2298 - RNA, 37 nt, synthetic construct
  misc_feature 1..37: note = Description of Artificial Sequence: Syntheticoligonucleotide
  source 1..37: mol_type = other RNA
attgctccttacgaggagactgcccaacttctgctgg

SEQ ID NO: 2299 - RNA, 37 nt, synthetic construct
  misc_feature 1..37: note = Description of Artificial Sequence: Syntheticoligonucleotide
  source 1..37: mol_type = other RNA
attgctccttacgaggagacctgcccaacttctgctg

SEQ ID NO: 2300 - RNA, 37 nt, synthetic construct
  misc_feature 1..37: note = Description of Artificial Sequence: Syntheticoligonucleotide
  source 1..37: mol_type = other RNA
attgctccttacgaggagactctgcccaacttctgct

SEQ ID NO: 2301 - RNA, 37 nt, synthetic construct
  misc_feature 1..37: note = Description of Artificial Sequence: Syntheticoligonucleotide
  source 1..37: mol_type = other RNA
attgctccttacgaggagactgacttttctgcccaac

SEQ ID NO: 2302 - RNA, 37 nt, synthetic construct
  misc_feature 1..37: note = Description of Artificial Sequence: Syntheticoligonucleotide
  source 1..37: mol_type = other RNA
attgctccttacgaggagacctgacttttctgcccaa

SEQ ID NO: 2303 - RNA, 37 nt, synthetic construct
  misc_feature 1..37: note = Description of Artificial Sequence: Syntheticoligonucleotide
  source 1..37: mol_type = other RNA
attgctccttacgaggagactctgacttttctgccca

SEQ ID NO: 2304 - RNA, 37 nt, synthetic construct
  misc_feature 1..37: note = Description of Artificial Sequence: Syntheticoligonucleotide
  source 1..37: mol_type = other RNA
attgctccttacgaggagacccagaggagcttccggc

SEQ ID NO: 2305 - RNA, 37 nt, synthetic construct
  misc_feature 1..37: note = Description of Artificial Sequence: Syntheticoligonucleotide
  source 1..37: mol_type = other RNA
attgctccttacgaggagacaggtctgccggaagctc

SEQ ID NO: 2306 - RNA, 37 nt, synthetic construct
  misc_feature 1..37: note = Description of Artificial Sequence: Syntheticoligonucleotide
  source 1..37: mol_type = other RNA
attgctccttacgaggagaccggcagacctgaagcac

SEQ ID NO: 2307 - RNA, 37 nt, synthetic construct
  misc_feature 1..37: note = Description of Artificial Sequence: Syntheticoligonucleotide
  source 1..37: mol_type = other RNA
attgctccttacgaggagaccagtgcttcaggtctgc

SEQ ID NO: 2308 - RNA, 37 nt, synthetic construct
  misc_feature 1..37: note = Description of Artificial Sequence: Syntheticoligonucleotide
  source 1..37: mol_type = other RNA
attgctccttacgaggagacaacagcgcaggcagtgg

SEQ ID NO: 2309 - RNA, 37 nt, synthetic construct
  misc_feature 1..37: note = Description of Artificial Sequence: Syntheticoligonucleotide
  source 1..37: mol_type = other RNA
attgctccttacgaggagacaaccaggagccagcctc

SEQ ID NO: 2310 - RNA, 37 nt, synthetic construct
  misc_feature 1..37: note = Description of Artificial Sequence: Syntheticoligonucleotide
  source 1..37: mol_type = other RNA
attgctccttacgaggagactccaggcgcatctggcc

SEQ ID NO: 2311 - RNA, 37 nt, synthetic construct
  misc_feature 1..37: note = Description of Artificial Sequence: Syntheticoligonucleotide
  source 1..37: mol_type = other RNA
attgctccttacgaggagacctccaggcgcatctggc

SEQ ID NO: 2312 - RNA, 37 nt, synthetic construct
  misc_feature 1..37: note = Description of Artificial Sequence: Syntheticoligonucleotide
  source 1..37: mol_type = other RNA
attgctccttacgaggagactctccaggcgcatctgg

SEQ ID NO: 2313 - RNA, 37 nt, synthetic construct
  misc_feature 1..37: note = Description of Artificial Sequence: Syntheticoligonucleotide
  source 1..37: mol_type = other RNA
attgctccttacgaggagacctccagttcctcgttga

SEQ ID NO: 2314 - RNA, 37 nt, synthetic construct
  misc_feature 1..37: note = Description of Artificial Sequence: Syntheticoligonucleotide
  source 1..37: mol_type = other RNA
attgctccttacgaggagactccagttcctcgttgag

SEQ ID NO: 2315 - RNA, 37 nt, synthetic construct
  misc_feature 1..37: note = Description of Artificial Sequence: Syntheticoligonucleotide
  source 1..37: mol_type = other RNA
attgctccttacgaggagacaggcagctcaacgagga

SEQ ID NO: 2316 - RNA, 37 nt, synthetic construct
  misc_feature 1..37: note = Description of Artificial Sequence: Syntheticoligonucleotide
  source 1..37: mol_type = other RNA
attgctccttacgaggagacctcgttgagctgcctga

SEQ ID NO: 2317 - RNA, 37 nt, synthetic construct
  misc_feature 1..37: note = Description of Artificial Sequence: Syntheticoligonucleotide
  source 1..37: mol_type = other RNA
attgctccttacgaggagacagctgcctgaatctccc

SEQ ID NO: 2318 - RNA, 37 nt, synthetic construct
  misc_feature 1..37: note = Description of Artificial Sequence: Syntheticoligonucleotide
  source 1..37: mol_type = other RNA
attgctccttacgaggagacgtccccaccatctccac

SEQ ID NO: 2319 - RNA, 37 nt, synthetic construct
  misc_feature 1..37: note = Description of Artificial Sequence: Syntheticoligonucleotide
  source 1..37: mol_type = other RNA
attgctccttacgaggagactccccaccatctccact

SEQ ID NO: 2320 - RNA, 37 nt, synthetic construct
  misc_feature 1..37: note = Description of Artificial Sequence: Syntheticoligonucleotide
  source 1..37: mol_type = other RNA
attgctccttacgaggagacccagagcccatggggca

SEQ ID NO: 2321 - RNA, 37 nt, synthetic construct
  misc_feature 1..37: note = Description of Artificial Sequence: Syntheticoligonucleotide
  source 1..37: mol_type = other RNA
attgctccttacgaggagacgccagagcccatggggc

SEQ ID NO: 2322 - RNA, 37 nt, synthetic construct
  misc_feature 1..37: note = Description of Artificial Sequence: Syntheticoligonucleotide
  source 1..37: mol_type = other RNA
attgctccttacgaggagaccagcctcagagatttgc

SEQ ID NO: 2323 - RNA, 37 nt, synthetic construct
  misc_feature 1..37: note = Description of Artificial Sequence: Syntheticoligonucleotide
  source 1..37: mol_type = other RNA
attgctccttacgaggagacggaggccgtggacagtg

SEQ ID NO: 2324 - RNA, 37 nt, synthetic construct
  misc_feature 1..37: note = Description of Artificial Sequence: Syntheticoligonucleotide
  source 1..37: mol_type = other RNA
attgctccttacgaggagacactgtccacggcctccc

SEQ ID NO: 2325 - RNA, 37 nt, synthetic construct
  misc_feature 1..37: note = Description of Artificial Sequence: Syntheticoligonucleotide
  source 1..37: mol_type = other RNA
attgctccttacgaggagacgctccatcagccactga

SEQ ID NO: 2326 - RNA, 37 nt, synthetic construct
  misc_feature 1..37: note = Description of Artificial Sequence: Syntheticoligonucleotide
  source 1..37: mol_type = other RNA
attgctccttacgaggagacaggcatgctgggcaggt

SEQ ID NO: 2327 - RNA, 37 nt, synthetic construct
  misc_feature 1..37: note = Description of Artificial Sequence: Syntheticoligonucleotide
  source 1..37: mol_type = other RNA
attgctccttacgaggagacctcgggaggtcagggca

SEQ ID NO: 2328 - RNA, 37 nt, synthetic construct
  misc_feature 1..37: note = Description of Artificial Sequence: Syntheticoligonucleotide
  source 1..37: mol_type = other RNA
attgctccttacgaggagacgctcgggaggtcagggc

SEQ ID NO: 2329 - RNA, 37 nt, synthetic construct
  misc_feature 1..37: note = Description of Artificial Sequence: Syntheticoligonucleotide
  source 1..37: mol_type = other RNA
attgctccttacgaggagacgagacctctccagctgc

SEQ ID NO: 2330 - RNA, 37 nt, synthetic construct
  misc_feature 1..37: note = Description of Artificial Sequence: Syntheticoligonucleotide
  source 1..37: mol_type = other RNA
attgctccttacgaggagacttggagacctctccagc

SEQ ID NO: 2331 - RNA, 37 nt, synthetic construct
  misc_feature 1..37: note = Description of Artificial Sequence: Syntheticoligonucleotide
  source 1..37: mol_type = other RNA
attgctccttacgaggagacgaagcttgttggagacc

SEQ ID NO: 2332 - RNA, 37 nt, synthetic construct
  misc_feature 1..37: note = Description of Artificial Sequence: Syntheticoligonucleotide
  source 1..37: mol_type = other RNA
attgctccttacgaggagacggaagcttgttggagac

SEQ ID NO: 2333 - RNA, 37 nt, synthetic construct
  misc_feature 1..37: note = Description of Artificial Sequence: Syntheticoligonucleotide
  source 1..37: mol_type = other RNA
attgctccttacgaggagactggaagcttgttggaga

SEQ ID NO: 2334 - RNA, 37 nt, synthetic construct
  misc_feature 1..37: note = Description of Artificial Sequence: Syntheticoligonucleotide
  source 1..37: mol_type = other RNA
attgctccttacgaggagactaccgctcactgcagga

SEQ ID NO: 2335 - RNA, 37 nt, synthetic construct
  misc_feature 1..37: note = Description of Artificial Sequence: Syntheticoligonucleotide
  source 1..37: mol_type = other RNA
attgctccttacgaggagacctgctgctcctctccag

SEQ ID NO: 2336 - RNA, 37 nt, synthetic construct
  misc_feature 1..37: note = Description of Artificial Sequence: Syntheticoligonucleotide
  source 1..37: mol_type = other RNA
attgctccttacgaggagacccgctccaggctcttgc

SEQ ID NO: 2337 - RNA, 37 nt, synthetic construct
  misc_feature 1..37: note = Description of Artificial Sequence: Syntheticoligonucleotide
  source 1..37: mol_type = other RNA
attgctccttacgaggagactgcccagtccggggtgg

SEQ ID NO: 2338 - RNA, 37 nt, synthetic construct
  misc_feature 1..37: note = Description of Artificial Sequence: Syntheticoligonucleotide
  source 1..37: mol_type = other RNA
attgctccttacgaggagacggccagctgccgttctg

SEQ ID NO: 2339 - RNA, 37 nt, synthetic construct
  misc_feature 1..37: note = Description of Artificial Sequence: Syntheticoligonucleotide
  source 1..37: mol_type = other RNA
attgctccttacgaggagacgcagccaacagcacctc

SEQ ID NO: 2340 - RNA, 37 nt, synthetic construct
  misc_feature 1..37: note = Description of Artificial Sequence: Syntheticoligonucleotide
  source 1..37: mol_type = other RNA
attgctccttacgaggagacgctgccaaggagcaccg

SEQ ID NO: 2341 - RNA, 37 nt, synthetic construct
  misc_feature 1..37: note = Description of Artificial Sequence: Syntheticoligonucleotide
  source 1..37: mol_type = other RNA
attgctccttacgaggagaccccagcacagcaatcac

SEQ ID NO: 2342 - RNA, 37 nt, synthetic construct
  misc_feature 1..37: note = Description of Artificial Sequence: Syntheticoligonucleotide
  source 1..37: mol_type = other RNA
attgctccttacgaggagacgcccagcacagcaatca

SEQ ID NO: 2343 - RNA, 37 nt, synthetic construct
  misc_feature 1..37: note = Description of Artificial Sequence: Syntheticoligonucleotide
  source 1..37: mol_type = other RNA
attgctccttacgaggagacctgtgctgggcaaagct

SEQ ID NO: 2344 - RNA, 37 nt, synthetic construct
  misc_feature 1..37: note = Description of Artificial Sequence: Syntheticoligonucleotide
  source 1..37: mol_type = other RNA
attgctccttacgaggagacccctgaccagctttgcc

SEQ ID NO: 2345 - RNA, 37 nt, synthetic construct
  misc_feature 1..37: note = Description of Artificial Sequence: Syntheticoligonucleotide
  source 1..37: mol_type = other RNA
attgctccttacgaggagacggctggggcagtgagcc

SEQ ID NO: 2346 - RNA, 37 nt, synthetic construct
  misc_feature 1..37: note = Description of Artificial Sequence: Syntheticoligonucleotide
  source 1..37: mol_type = other RNA
attgctccttacgaggagactggccggcttccccagt

SEQ ID NO: 2347 - RNA, 37 nt, synthetic construct
  misc_feature 1..37: note = Description of Artificial Sequence: Syntheticoligonucleotide
  source 1..37: mol_type = other RNA
attgctccttacgaggagaccccagtacgactttgtc

SEQ ID NO: 2348 - RNA, 37 nt, synthetic construct
  misc_feature 1..37: note = Description of Artificial Sequence: Syntheticoligonucleotide
  source 1..37: mol_type = other RNA
attgctccttacgaggagacgtcttctctgtcccctg

SEQ ID NO: 2349 - RNA, 37 nt, synthetic construct
  misc_feature 1..37: note = Description of Artificial Sequence: Syntheticoligonucleotide
  source 1..37: mol_type = other RNA
attgctccttacgaggagactcttctctgtcccctgc

SEQ ID NO: 2350 - RNA, 37 nt, synthetic construct
  misc_feature 1..37: note = Description of Artificial Sequence: Syntheticoligonucleotide
  source 1..37: mol_type = other RNA
attgctccttacgaggagactctgtcccctgccattg

SEQ ID NO: 2351 - RNA, 37 nt, synthetic construct
  misc_feature 1..37: note = Description of Artificial Sequence: Syntheticoligonucleotide
  source 1..37: mol_type = other RNA
attgctccttacgaggagacaagcaatggcaggggac

SEQ ID NO: 2352 - RNA, 37 nt, synthetic construct
  misc_feature 1..37: note = Description of Artificial Sequence: Syntheticoligonucleotide
  source 1..37: mol_type = other RNA
attgctccttacgaggagaccttgaaccgtccggggg

SEQ ID NO: 2353 - RNA, 37 nt, synthetic construct
  misc_feature 1..37: note = Description of Artificial Sequence: Syntheticoligonucleotide
  source 1..37: mol_type = other RNA
attgctccttacgaggagacaaccgtccgggggatgc

SEQ ID NO: 2354 - RNA, 37 nt, synthetic construct
  misc_feature 1..37: note = Description of Artificial Sequence: Syntheticoligonucleotide
  source 1..37: mol_type = other RNA
attgctccttacgaggagactccctgggcccacagcc

SEQ ID NO: 2355 - RNA, 37 nt, synthetic construct
  misc_feature 1..37: note = Description of Artificial Sequence: Syntheticoligonucleotide
  source 1..37: mol_type = other RNA
attgctccttacgaggagacaagatgtggctgaaaac

SEQ ID NO: 2356 - RNA, 37 nt, synthetic construct
  misc_feature 1..37: note = Description of Artificial Sequence: Syntheticoligonucleotide
  source 1..37: mol_type = other RNA
attgctccttacgaggagactcagccacatcttgaag

SEQ ID NO: 2357 - RNA, 37 nt, synthetic construct
  misc_feature 1..37: note = Description of Artificial Sequence: Syntheticoligonucleotide
  source 1..37: mol_type = other RNA
attgctccttacgaggagaccagccacatcttgaaga

SEQ ID NO: 2358 - RNA, 37 nt, synthetic construct
  misc_feature 1..37: note = Description of Artificial Sequence: Syntheticoligonucleotide
  source 1..37: mol_type = other RNA
attgctccttacgaggagacagccacatcttgaagag

SEQ ID NO: 2359 - RNA, 37 nt, synthetic construct
  misc_feature 1..37: note = Description of Artificial Sequence: Syntheticoligonucleotide
  source 1..37: mol_type = other RNA
attgctccttacgaggagacaagagacctgaccgcgt

SEQ ID NO: 2360 - RNA, 37 nt, synthetic construct
  misc_feature 1..37: note = Description of Artificial Sequence: Syntheticoligonucleotide
  source 1..37: mol_type = other RNA
attgctccttacgaggagactgctcatcctagacggc

SEQ ID NO: 2361 - RNA, 37 nt, synthetic construct
  misc_feature 1..37: note = Description of Artificial Sequence: Syntheticoligonucleotide
  source 1..37: mol_type = other RNA
attgctccttacgaggagaccagctcctcgaagccgt

SEQ ID NO: 2362 - RNA, 37 nt, synthetic construct
  misc_feature 1..37: note = Description of Artificial Sequence: Syntheticoligonucleotide
  source 1..37: mol_type = other RNA
attgctccttacgaggagaccgcttccagctcctcga

SEQ ID NO: 2363 - RNA, 37 nt, synthetic construct
  misc_feature 1..37: note = Description of Artificial Sequence: Syntheticoligonucleotide
  source 1..37: mol_type = other RNA
attgctccttacgaggagacgaggagctggaagcgca

SEQ ID NO: 2364 - RNA, 37 nt, synthetic construct
  misc_feature 1..37: note = Description of Artificial Sequence: Syntheticoligonucleotide
  source 1..37: mol_type = other RNA
attgctccttacgaggagacctgcacagcacgtgcgg

SEQ ID NO: 2365 - RNA, 37 nt, synthetic construct
  misc_feature 1..37: note = Description of Artificial Sequence: Syntheticoligonucleotide
  source 1..37: mol_type = other RNA
attgctccttacgaggagactggaaaaggccggccag

SEQ ID NO: 2366 - RNA, 37 nt, synthetic construct
  misc_feature 1..37: note = Description of Artificial Sequence: Syntheticoligonucleotide
  source 1..37: mol_type = other RNA
attgctccttacgaggagacttctggaaaaggccggc

SEQ ID NO: 2367 - RNA, 37 nt, synthetic construct
  misc_feature 1..37: note = Description of Artificial Sequence: Syntheticoligonucleotide
  source 1..37: mol_type = other RNA
attgctccttacgaggagactccagaagaagctgctc

SEQ ID NO: 2368 - RNA, 37 nt, synthetic construct
  misc_feature 1..37: note = Description of Artificial Sequence: Syntheticoligonucleotide
  source 1..37: mol_type = other RNA
attgctccttacgaggagacccagaagaagctgctcc

SEQ ID NO: 2369 - RNA, 37 nt, synthetic construct
  misc_feature 1..37: note = Description of Artificial Sequence: Syntheticoligonucleotide
  source 1..37: mol_type = other RNA
attgctccttacgaggagaccagaagaagctgctccg

SEQ ID NO: 2370 - RNA, 37 nt, synthetic construct
  misc_feature 1..37: note = Description of Artificial Sequence: Syntheticoligonucleotide
  source 1..37: mol_type = other RNA
attgctccttacgaggagaccaccctcctcctcacag

SEQ ID NO: 2371 - RNA, 37 nt, synthetic construct
  misc_feature 1..37: note = Description of Artificial Sequence: Syntheticoligonucleotide
  source 1..37: mol_type = other RNA
attgctccttacgaggagacctcaggctctggaccag

SEQ ID NO: 2372 - RNA, 37 nt, synthetic construct
  misc_feature 1..37: note = Description of Artificial Sequence: Syntheticoligonucleotide
  source 1..37: mol_type = other RNA
attgctccttacgaggagacgagctgtccggcttctc

SEQ ID NO: 2373 - RNA, 37 nt, synthetic construct
  misc_feature 1..37: note = Description of Artificial Sequence: Syntheticoligonucleotide
  source 1..37: mol_type = other RNA
attgctccttacgaggagacagctgtccggcttctcc

SEQ ID NO: 2374 - RNA, 37 nt, synthetic construct
  misc_feature 1..37: note = Description of Artificial Sequence: Syntheticoligonucleotide
  source 1..37: mol_type = other RNA
attgctccttacgaggagactccatggagcaggccca

SEQ ID NO: 2375 - RNA, 37 nt, synthetic construct
  misc_feature 1..37: note = Description of Artificial Sequence: Syntheticoligonucleotide
  source 1..37: mol_type = other RNA
attgctccttacgaggagacgagagctcagggatgac

SEQ ID NO: 2376 - RNA, 37 nt, synthetic construct
  misc_feature 1..37: note = Description of Artificial Sequence: Syntheticoligonucleotide
  source 1..37: mol_type = other RNA
attgctccttacgaggagacagagctcagggatgaca

SEQ ID NO: 2377 - RNA, 37 nt, synthetic construct
  misc_feature 1..37: note = Description of Artificial Sequence: Syntheticoligonucleotide
  source 1..37: mol_type = other RNA
attgctccttacgaggagacgtgctctgtcatccctg

SEQ ID NO: 2378 - RNA, 37 nt, synthetic construct
  misc_feature 1..37: note = Description of Artificial Sequence: Syntheticoligonucleotide
  source 1..37: mol_type = other RNA
attgctccttacgaggagacttctcagtcacagccac

SEQ ID NO: 2379 - RNA, 37 nt, synthetic construct
  misc_feature 1..37: note = Description of Artificial Sequence: Syntheticoligonucleotide
  source 1..37: mol_type = other RNA
attgctccttacgaggagactcagtcacagccacagc

SEQ ID NO: 2380 - RNA, 37 nt, synthetic construct
  misc_feature 1..37: note = Description of Artificial Sequence: Syntheticoligonucleotide
  source 1..37: mol_type = other RNA
attgctccttacgaggagacgtgccgggcagtgtgcc

SEQ ID NO: 2381 - RNA, 37 nt, synthetic construct
  misc_feature 1..37: note = Description of Artificial Sequence: Syntheticoligonucleotide
  source 1..37: mol_type = other RNA
attgctccttacgaggagactgccgggcagtgtgcca

SEQ ID NO: 2382 - RNA, 37 nt, synthetic construct
  misc_feature 1..37: note = Description of Artificial Sequence: Syntheticoligonucleotide
  source 1..37: mol_type = other RNA
attgctccttacgaggagacgcgtcctccccaagctc

SEQ ID NO: 2383 - RNA, 37 nt, synthetic construct
  misc_feature 1..37: note = Description of Artificial Sequence: Syntheticoligonucleotide
  source 1..37: mol_type = other RNA
attgctccttacgaggagacgggaggacgccaagctg

SEQ ID NO: 2384 - RNA, 37 nt, synthetic construct
  misc_feature 1..37: note = Description of Artificial Sequence: Syntheticoligonucleotide
  source 1..37: mol_type = other RNA
attgctccttacgaggagacgccagctctgccagggc

SEQ ID NO: 2385 - RNA, 37 nt, synthetic construct
  misc_feature 1..37: note = Description of Artificial Sequence: Syntheticoligonucleotide
  source 1..37: mol_type = other RNA
attgctccttacgaggagacatgtctgcggcccagct

SEQ ID NO: 2386 - RNA, 37 nt, synthetic construct
  misc_feature 1..37: note = Description of Artificial Sequence: Syntheticoligonucleotide
  source 1..37: mol_type = other RNA
attgctccttacgaggagacgatgtctgcggcccagc

SEQ ID NO: 2387 - RNA, 37 nt, synthetic construct
  misc_feature 1..37: note = Description of Artificial Sequence: Syntheticoligonucleotide
  source 1..37: mol_type = other RNA
attgctccttacgaggagacccatccgcagacgtgag

SEQ ID NO: 2388 - RNA, 37 nt, synthetic construct
  misc_feature 1..37: note = Description of Artificial Sequence: Syntheticoligonucleotide
  source 1..37: mol_type = other RNA
attgctccttacgaggagacgccatcgcccaggtcct

SEQ ID NO: 2389 - RNA, 37 nt, synthetic construct
  misc_feature 1..37: note = Description of Artificial Sequence: Syntheticoligonucleotide
  source 1..37: mol_type = other RNA
attgctccttacgaggagacggccatcgcccaggtcc

SEQ ID NO: 2390 - RNA, 37 nt, synthetic construct
  misc_feature 1..37: note = Description of Artificial Sequence: Syntheticoligonucleotide
  source 1..37: mol_type = other RNA
attgctccttacgaggagacgactaagcctttggcca

SEQ ID NO: 2391 - RNA, 37 nt, synthetic construct
  misc_feature 1..37: note = Description of Artificial Sequence: Syntheticoligonucleotide
  source 1..37: mol_type = other RNA
attgctccttacgaggagacgtccaacacccaccgcg

SEQ ID NO: 2392 - RNA, 37 nt, synthetic construct
  misc_feature 1..37: note = Description of Artificial Sequence: Syntheticoligonucleotide
  source 1..37: mol_type = other RNA
attgctccttacgaggagaccaggaggaagctgggga

SEQ ID NO: 2393 - RNA, 37 nt, synthetic construct
  misc_feature 1..37: note = Description of Artificial Sequence: Syntheticoligonucleotide
  source 1..37: mol_type = other RNA
attgctccttacgaggagaccccagcttcctcctgca

SEQ ID NO: 2394 - RNA, 37 nt, synthetic construct
  misc_feature 1..37: note = Description of Artificial Sequence: Syntheticoligonucleotide
  source 1..37: mol_type = other RNA
attgctccttacgaggagacctcctgcaatgcttcct

SEQ ID NO: 2395 - RNA, 37 nt, synthetic construct
  misc_feature 1..37: note = Description of Artificial Sequence: Syntheticoligonucleotide
  source 1..37: mol_type = other RNA
attgctccttacgaggagacctgggggccctgtggct

SEQ ID NO: 2396 - RNA, 37 nt, synthetic construct
  misc_feature 1..37: note = Description of Artificial Sequence: Syntheticoligonucleotide
  source 1..37: mol_type = other RNA
attgctccttacgaggagacgccactcagagccagcc

SEQ ID NO: 2397 - RNA, 37 nt, synthetic construct
  misc_feature 1..37: note = Description of Artificial Sequence: Syntheticoligonucleotide
  source 1..37: mol_type = other RNA
attgctccttacgaggagaccgccactcagagccagc

SEQ ID NO: 2398 - RNA, 37 nt, synthetic construct
  misc_feature 1..37: note = Description of Artificial Sequence: Syntheticoligonucleotide
  source 1..37: mol_type = other RNA
attgctccttacgaggagacatttcgccactcagagc

SEQ ID NO: 2399 - RNA, 37 nt, synthetic construct
  misc_feature 1..37: note = Description of Artificial Sequence: Syntheticoligonucleotide
  source 1..37: mol_type = other RNA
attgctccttacgaggagactccttgatttcgccact

SEQ ID NO: 2400 - RNA, 37 nt, synthetic construct
  misc_feature 1..37: note = Description of Artificial Sequence: Syntheticoligonucleotide
  source 1..37: mol_type = other RNA
attgctccttacgaggagacgggtcaatgctaggtac

SEQ ID NO: 2401 - RNA, 37 nt, synthetic construct
  misc_feature 1..37: note = Description of Artificial Sequence: Syntheticoligonucleotide
  source 1..37: mol_type = other RNA
attgctccttacgaggagaccttggggtcaatgctag

SEQ ID NO: 2402 - RNA, 37 nt, synthetic construct
  misc_feature 1..37: note = Description of Artificial Sequence: Syntheticoligonucleotide
  source 1..37: mol_type = other RNA
attgctccttacgaggagacttccttggggtcaatgc

SEQ ID NO: 2403 - RNA, 37 nt, synthetic construct
  misc_feature 1..37: note = Description of Artificial Sequence: Syntheticoligonucleotide
  source 1..37: mol_type = other RNA
attgctccttacgaggagacaccccaaggaagaagag

SEQ ID NO: 2404 - RNA, 37 nt, synthetic construct
  misc_feature 1..37: note = Description of Artificial Sequence: Syntheticoligonucleotide
  source 1..37: mol_type = other RNA
attgctccttacgaggagactcatagggcctcttctt

SEQ ID NO: 2405 - RNA, 37 nt, synthetic construct
  misc_feature 1..37: note = Description of Artificial Sequence: Syntheticoligonucleotide
  source 1..37: mol_type = other RNA
attgctccttacgaggagacctggctgggctgatctt

SEQ ID NO: 2406 - RNA, 37 nt, synthetic construct
  misc_feature 1..37: note = Description of Artificial Sequence: Syntheticoligonucleotide
  source 1..37: mol_type = other RNA
attgctccttacgaggagactggctgggctgatcttc

SEQ ID NO: 2407 - RNA, 37 nt, synthetic construct
  misc_feature 1..37: note = Description of Artificial Sequence: Syntheticoligonucleotide
  source 1..37: mol_type = other RNA
attgctccttacgaggagaccagcctcccgcccgctg

SEQ ID NO: 2408 - RNA, 37 nt, synthetic construct
  misc_feature 1..37: note = Description of Artificial Sequence: Syntheticoligonucleotide
  source 1..37: mol_type = other RNA
attgctccttacgaggagacctgtccaccgaggcagc

SEQ ID NO: 2409 - RNA, 37 nt, synthetic construct
  misc_feature 1..37: note = Description of Artificial Sequence: Syntheticoligonucleotide
  source 1..37: mol_type = other RNA
attgctccttacgaggagactgcttcctgtccaccga

SEQ ID NO: 2410 - RNA, 37 nt, synthetic construct
  misc_feature 1..37: note = Description of Artificial Sequence: Syntheticoligonucleotide
  source 1..37: mol_type = other RNA
attgctccttacgaggagacaggtacctcgcaagcac

SEQ ID NO: 2411 - RNA, 37 nt, synthetic construct
  misc_feature 1..37: note = Description of Artificial Sequence: Syntheticoligonucleotide
  source 1..37: mol_type = other RNA
attgctccttacgaggagaccgaggtacctgaagcgg

SEQ ID NO: 2412 - RNA, 37 nt, synthetic construct
  misc_feature 1..37: note = Description of Artificial Sequence: Syntheticoligonucleotide
  source 1..37: mol_type = other RNA
attgctccttacgaggagaccagcctcctcggcctcg

SEQ ID NO: 2413 - RNA, 37 nt, synthetic construct
  misc_feature 1..37: note = Description of Artificial Sequence: Syntheticoligonucleotide
  source 1..37: mol_type = other RNA
attgctccttacgaggagacggcagcacgtggtacag

SEQ ID NO: 2414 - RNA, 37 nt, synthetic construct
  misc_feature 1..37: note = Description of Artificial Sequence: Syntheticoligonucleotide
  source 1..37: mol_type = other RNA
attgctccttacgaggagacgcagcacgtggtacagg

SEQ ID NO: 2415 - RNA, 37 nt, synthetic construct
  misc_feature 1..37: note = Description of Artificial Sequence: Syntheticoligonucleotide
  source 1..37: mol_type = other RNA
attgctccttacgaggagactctgggcacccgcctca

SEQ ID NO: 2416 - RNA, 37 nt, synthetic construct
  misc_feature 1..37: note = Description of Artificial Sequence: Syntheticoligonucleotide
  source 1..37: mol_type = other RNA
attgctccttacgaggagacctgggcacccgcctcac

SEQ ID NO: 2417 - RNA, 37 nt, synthetic construct
  misc_feature 1..37: note = Description of Artificial Sequence: Syntheticoligonucleotide
  source 1..37: mol_type = other RNA
attgctccttacgaggagactgggcacccgcctcacg

SEQ ID NO: 2418 - RNA, 37 nt, synthetic construct
  misc_feature 1..37: note = Description of Artificial Sequence: Syntheticoligonucleotide
  source 1..37: mol_type = other RNA
attgctccttacgaggagaccccagtacatgtgcatc

SEQ ID NO: 2419 - RNA, 37 nt, synthetic construct
  misc_feature 1..37: note = Description of Artificial Sequence: Syntheticoligonucleotide
  source 1..37: mol_type = other RNA
attgctccttacgaggagacgcccgccgcctccaagg

SEQ ID NO: 2420 - RNA, 37 nt, synthetic construct
  misc_feature 1..37: note = Description of Artificial Sequence: Syntheticoligonucleotide
  source 1..37: mol_type = other RNA
attgctccttacgaggagacgaggcggcgggccaaga

SEQ ID NO: 2421 - RNA, 37 nt, synthetic construct
  misc_feature 1..37: note = Description of Artificial Sequence: Syntheticoligonucleotide
  source 1..37: mol_type = other RNA
attgctccttacgaggagactccctggacctccgcag

SEQ ID NO: 2422 - RNA, 37 nt, synthetic construct
  misc_feature 1..37: note = Description of Artificial Sequence: Syntheticoligonucleotide
  source 1..37: mol_type = other RNA
attgctccttacgaggagacgcccctctggattgggg

SEQ ID NO: 2423 - RNA, 37 nt, synthetic construct
  misc_feature 1..37: note = Description of Artificial Sequence: Syntheticoligonucleotide
  source 1..37: mol_type = other RNA
attgctccttacgaggagaccccctctggattgggga

SEQ ID NO: 2424 - RNA, 37 nt, synthetic construct
  misc_feature 1..37: note = Description of Artificial Sequence: Syntheticoligonucleotide
  source 1..37: mol_type = other RNA
attgctccttacgaggagacgggagcctcgtgggact

SEQ ID NO: 2425 - RNA, 37 nt, synthetic construct
  misc_feature 1..37: note = Description of Artificial Sequence: Syntheticoligonucleotide
  source 1..37: mol_type = other RNA
attgctccttacgaggagacgtctccccatgctgctg

SEQ ID NO: 2426 - RNA, 37 nt, synthetic construct
  misc_feature 1..37: note = Description of Artificial Sequence: Syntheticoligonucleotide
  source 1..37: mol_type = other RNA
attgctccttacgaggagactcctctgctgcctgaag

SEQ ID NO: 2427 - RNA, 37 nt, synthetic construct
  misc_feature 1..37: note = Description of Artificial Sequence: Syntheticoligonucleotide
  source 1..37: mol_type = other RNA
attgctccttacgaggagacaggcagcagaggagaag

SEQ ID NO: 2428 - RNA, 37 nt, synthetic construct
  misc_feature 1..37: note = Description of Artificial Sequence: Syntheticoligonucleotide
  source 1..37: mol_type = other RNA
attgctccttacgaggagacaaaggctcgatggtgaa

SEQ ID NO: 2429 - RNA, 37 nt, synthetic construct
  misc_feature 1..37: note = Description of Artificial Sequence: Syntheticoligonucleotide
  source 1..37: mol_type = other RNA
attgctccttacgaggagacgaaaggctcgatggtga

SEQ ID NO: 2430 - RNA, 37 nt, synthetic construct
  misc_feature 1..37: note = Description of Artificial Sequence: Syntheticoligonucleotide
  source 1..37: mol_type = other RNA
attgctccttacgaggagacaccatcgagcctttcaa

SEQ ID NO: 2431 - RNA, 37 nt, synthetic construct
  misc_feature 1..37: note = Description of Artificial Sequence: Syntheticoligonucleotide
  source 1..37: mol_type = other RNA
attgctccttacgaggagacgctttgaaaggctcgat

SEQ ID NO: 2432 - RNA, 37 nt, synthetic construct
  misc_feature 1..37: note = Description of Artificial Sequence: Syntheticoligonucleotide
  source 1..37: mol_type = other RNA
attgctccttacgaggagacagggacttggctttgaa

SEQ ID NO: 2433 - RNA, 37 nt, synthetic construct
  misc_feature 1..37: note = Description of Artificial Sequence: Syntheticoligonucleotide
  source 1..37: mol_type = other RNA
attgctccttacgaggagaccaaagccaagtccctga

SEQ ID NO: 2434 - RNA, 37 nt, synthetic construct
  misc_feature 1..37: note = Description of Artificial Sequence: Syntheticoligonucleotide
  source 1..37: mol_type = other RNA
attgctccttacgaggagacaaagccaagtccctgaa

SEQ ID NO: 2435 - RNA, 37 nt, synthetic construct
  misc_feature 1..37: note = Description of Artificial Sequence: Syntheticoligonucleotide
  source 1..37: mol_type = other RNA
attgctccttacgaggagaccacatccttcagggact

SEQ ID NO: 2436 - RNA, 37 nt, synthetic construct
  misc_feature 1..37: note = Description of Artificial Sequence: Syntheticoligonucleotide
  source 1..37: mol_type = other RNA
attgctccttacgaggagacccaggtcttccacatcc

SEQ ID NO: 2437 - RNA, 37 nt, synthetic construct
  misc_feature 1..37: note = Description of Artificial Sequence: Syntheticoligonucleotide
  source 1..37: mol_type = other RNA
attgctccttacgaggagaccccaggtcttccacatc

SEQ ID NO: 2438 - RNA, 37 nt, synthetic construct
  misc_feature 1..37: note = Description of Artificial Sequence: Syntheticoligonucleotide
  source 1..37: mol_type = other RNA
attgctccttacgaggagacctcggaagacacagctg

SEQ ID NO: 2439 - RNA, 37 nt, synthetic construct
  misc_feature 1..37: note = Description of Artificial Sequence: Syntheticoligonucleotide
  source 1..37: mol_type = other RNA
attgctccttacgaggagacggtcccgaacagcaggg

SEQ ID NO: 2440 - RNA, 37 nt, synthetic construct
  misc_feature 1..37: note = Description of Artificial Sequence: Syntheticoligonucleotide
  source 1..37: mol_type = other RNA
attgctccttacgaggagacaggtcccgaacagcagg

SEQ ID NO: 2441 - RNA, 37 nt, synthetic construct
  misc_feature 1..37: note = Description of Artificial Sequence: Syntheticoligonucleotide
  source 1..37: mol_type = other RNA
attgctccttacgaggagactttaggtcccgaacagc

SEQ ID NO: 2442 - RNA, 37 nt, synthetic construct
  misc_feature 1..37: note = Description of Artificial Sequence: Syntheticoligonucleotide
  source 1..37: mol_type = other RNA
attgctccttacgaggagacctttaggtcccgaacag

SEQ ID NO: 2443 - RNA, 37 nt, synthetic construct
  misc_feature 1..37: note = Description of Artificial Sequence: Syntheticoligonucleotide
  source 1..37: mol_type = other RNA
attgctccttacgaggagacgggacctaaagaaactg

SEQ ID NO: 2444 - RNA, 37 nt, synthetic construct
  misc_feature 1..37: note = Description of Artificial Sequence: Syntheticoligonucleotide
  source 1..37: mol_type = other RNA
attgctccttacgaggagacgggaaagcctgggggcc

SEQ ID NO: 2445 - RNA, 37 nt, synthetic construct
  misc_feature 1..37: note = Description of Artificial Sequence: Syntheticoligonucleotide
  source 1..37: mol_type = other RNA
attgctccttacgaggagacggggaaagcctgggggc

SEQ ID NO: 2446 - RNA, 37 nt, synthetic construct
  misc_feature 1..37: note = Description of Artificial Sequence: Syntheticoligonucleotide
  source 1..37: mol_type = other RNA
attgctccttacgaggagacccccaaactggtgcgga

SEQ ID NO: 2447 - RNA, 37 nt, synthetic construct
  misc_feature 1..37: note = Description of Artificial Sequence: Syntheticoligonucleotide
  source 1..37: mol_type = other RNA
attgctccttacgaggagaccccaaactggtgcggat

SEQ ID NO: 2448 - RNA, 37 nt, synthetic construct
  misc_feature 1..37: note = Description of Artificial Sequence: Syntheticoligonucleotide
  source 1..37: mol_type = other RNA
attgctccttacgaggagacttctcactcagcgcatc

SEQ ID NO: 2449 - RNA, 37 nt, synthetic construct
  misc_feature 1..37: note = Description of Artificial Sequence: Syntheticoligonucleotide
  source 1..37: mol_type = other RNA
attgctccttacgaggagacagctgggggaaggtggc

SEQ ID NO: 2450 - RNA, 37 nt, synthetic construct
  misc_feature 1..37: note = Description of Artificial Sequence: Syntheticoligonucleotide
  source 1..37: mol_type = other RNA
attgctccttacgaggagacccccagctgaagtcctt

SEQ ID NO: 2451 - RNA, 37 nt, synthetic construct
  misc_feature 1..37: note = Description of Artificial Sequence: Syntheticoligonucleotide
  source 1..37: mol_type = other RNA
attgctccttacgaggagaccaaggacttcagctggg

SEQ ID NO: 2452 - RNA, 37 nt, synthetic construct
  misc_feature 1..37: note = Description of Artificial Sequence: Syntheticoligonucleotide
  source 1..37: mol_type = other RNA
attgctccttacgaggagacccaaggacttcagctgg

SEQ ID NO: 2453 - RNA, 37 nt, synthetic construct
  misc_feature 1..37: note = Description of Artificial Sequence: Syntheticoligonucleotide
  source 1..37: mol_type = other RNA
attgctccttacgaggagacagggtttccaaggactt

SEQ ID NO: 2454 - RNA, 37 nt, synthetic construct
  misc_feature 1..37: note = Description of Artificial Sequence: Syntheticoligonucleotide
  source 1..37: mol_type = other RNA
attgctccttacgaggagactaggcacccaggtcagt

SEQ ID NO: 2455 - RNA, 37 nt, synthetic construct
  misc_feature 1..37: note = Description of Artificial Sequence: Syntheticoligonucleotide
  source 1..37: mol_type = other RNA
attgctccttacgaggagacgtaggcacccaggtcag

SEQ ID NO: 2456 - RNA, 37 nt, synthetic construct
  misc_feature 1..37: note = Description of Artificial Sequence: Syntheticoligonucleotide
  source 1..37: mol_type = other RNA
attgctccttacgaggagacgctcgctgcatccctgc

SEQ ID NO: 2457 - RNA, 37 nt, synthetic construct
  misc_feature 1..37: note = Description of Artificial Sequence: Syntheticoligonucleotide
  source 1..37: mol_type = other RNA
attgctccttacgaggagacgcctgagcagggatgca

SEQ ID NO: 2458 - RNA, 37 nt, synthetic construct
  misc_feature 1..37: note = Description of Artificial Sequence: Syntheticoligonucleotide
  source 1..37: mol_type = other RNA
attgctccttacgaggagactacaataactgcatctg

SEQ ID NO: 2459 - RNA, 37 nt, synthetic construct
  misc_feature 1..37: note = Description of Artificial Sequence: Syntheticoligonucleotide
  source 1..37: mol_type = other RNA
attgctccttacgaggagacgctcgtgtgcttccgga

SEQ ID NO: 2460 - RNA, 37 nt, synthetic construct
  misc_feature 1..37: note = Description of Artificial Sequence: Syntheticoligonucleotide
  source 1..37: mol_type = other RNA
attgctccttacgaggagaccggacatggtgtccctc

SEQ ID NO: 2461 - RNA, 37 nt, synthetic construct
  misc_feature 1..37: note = Description of Artificial Sequence: Syntheticoligonucleotide
  source 1..37: mol_type = other RNA
attgctccttacgaggagacacggctgccggggccca

SEQ ID NO: 2462 - RNA, 37 nt, synthetic construct
  misc_feature 1..37: note = Description of Artificial Sequence: Syntheticoligonucleotide
  source 1..37: mol_type = other RNA
attgctccttacgaggagacggaggtgtcctcatgtg

SEQ ID NO: 2463 - RNA, 37 nt, synthetic construct
  misc_feature 1..37: note = Description of Artificial Sequence: Syntheticoligonucleotide
  source 1..37: mol_type = other RNA
attgctccttacgaggagacctggacactgaatggga

SEQ ID NO: 2464 - RNA, 37 nt, synthetic construct
  misc_feature 1..37: note = Description of Artificial Sequence: Syntheticoligonucleotide
  source 1..37: mol_type = other RNA
attgctccttacgaggagacagtgtccaggaacacct

SEQ ID NO: 2465 - RNA, 37 nt, synthetic construct
  misc_feature 1..37: note = Description of Artificial Sequence: Syntheticoligonucleotide
  source 1..37: mol_type = other RNA
attgctccttacgaggagaccaggtgttcctggacac

SEQ ID NO: 2466 - RNA, 37 nt, synthetic construct
  misc_feature 1..37: note = Description of Artificial Sequence: Syntheticoligonucleotide
  source 1..37: mol_type = other RNA
attgctccttacgaggagacttgcaggtgttcctgga

SEQ ID NO: 2467 - RNA, 37 nt, synthetic construct
  misc_feature 1..37: note = Description of Artificial Sequence: Syntheticoligonucleotide
  source 1..37: mol_type = other RNA
attgctccttacgaggagacacggatcagcctgagat

SEQ ID NO: 2468 - protein, 772 aa, unidentified
  REGION 1..772: note = Description of Unknown:CasPhi sequence
MSNTAVSTREHMSNKTTPPSPLSLLLRAHFPGLKFESQDYKIAGKKLRDGGPEAVISYLTGKGQAKLKDVKPPAKAFVIAQSRPFIEWDLVRVSRQIQEKIFGIPATKGRPKQDGLSETAFNEAVASLEVDGKSKLNEETRAAFYEVLGLDAPSLHAQAQNALIKSAISIREGVLKKVENRNEKNLSKTKRRKEAGEEATFVEEKAHDERGYLIHPPGVNQTIPGYQAVVIKSCPSDFIGLPSGCLAKESAEALTDYLPHDRMTIPKGQPGYVPEWQHPLLNRRKNRRRRDWYSASLNKPKATCSKRSGTPNRKNSRTDQIQSGRFKGAIPVLMRFQDEWVIIDIRGLLRNARYRKLLKEKSTIPDLLSLFTGDPSIDMRQGVCTFIYKAGQACSAKMVKTKNAPEILSELTKSGPVVLVSIDLGQTNPIAAKVSRVTQLSDGQLSHETLLRELLSNDSSDGKEIARYRVASDRLRDKLANLAVERLSPEHKSEILRAKNDTPALCKARVCAALGLNPEMIAWDKMTPYTEFLATAYLEKGGDRKVATLKPKNRPEMLRRDIKFKGTEGVRIEVSPEAAEAYREAQWDLQRTSPEYLRLSTWKQELTKRILNQLRHKAAKSSQCEVVVMAFEDLNIKMMHGNGKWADGGWDAFFIKKRENRWFMQAFHKSLTELGAHKGVPTIEVTPHRTSITCTKCGHCDKANRDGERFACQKCGFVAHADLEIATDNIERVALTGKPMPKPESERSGDAKKSVGARKAAFKPEEDAEAAE

SEQ ID NO: 2469 - RNA, 36 nt, synthetic construct
  misc_feature 1..36: note = Description of Artificial Sequence: Syntheticoligonucleotide
  source 1..36: mol_type = other RNA
ctttcaagactaatagattgctccttacgaggagac

SEQ ID NO: 2470 - RNA, 20 nt, synthetic construct
  misc_feature 1..20: note = Description of Artificial Sequence: Syntheticoligonucleotide
  source 1..20: mol_type = other RNA
tcccacagatatccagaacc

SEQ ID NO: 2471 - RNA, 20 nt, synthetic construct
  misc_feature 1..20: note = Description of Artificial Sequence: Syntheticoligonucleotide
  source 1..20: mol_type = other RNA
agagtctctcagctggtaca

SEQ ID NO: 2472 - RNA, 20 nt, synthetic construct
  misc_feature 1..20: note = Description of Artificial Sequence: Syntheticoligonucleotide
  source 1..20: mol_type = other RNA
aagtccatagacctcatgtc

SEQ ID NO: 2473 - RNA, 20 nt, synthetic construct
  misc_feature 1..20: note = Description of Artificial Sequence: Syntheticoligonucleotide
  source 1..20: mol_type = other RNA
aagagcaacagtgctgtggc

SEQ ID NO: 2474 - RNA, 20 nt, synthetic construct
  misc_feature 1..20: note = Description of Artificial Sequence: Syntheticoligonucleotide
  source 1..20: mol_type = other RNA
gttgctccaggccacagcac

SEQ ID NO: 2475 - RNA, 20 nt, synthetic construct
  misc_feature 1..20: note = Description of Artificial Sequence: Syntheticoligonucleotide
  source 1..20: mol_type = other RNA
gcacatgcaaagtcagattt

SEQ ID NO: 2476 - RNA, 20 nt, synthetic construct
  misc_feature 1..20: note = Description of Artificial Sequence: Syntheticoligonucleotide
  source 1..20: mol_type = other RNA
gcatgtgcaaacgccttcaa

SEQ ID NO: 2477 - RNA, 20 nt, synthetic construct
  misc_feature 1..20: note = Description of Artificial Sequence: Syntheticoligonucleotide
  source 1..20: mol_type = other RNA
ctaaaaggaaaaacagacat

SEQ ID NO: 2478 - RNA, 20 nt, synthetic construct
  misc_feature 1..20: note = Description of Artificial Sequence: Syntheticoligonucleotide
  source 1..20: mol_type = other RNA
ctcgaccagcttgacatcac

SEQ ID NO: 2479 - RNA, 20 nt, synthetic construct
  misc_feature 1..20: note = Description of Artificial Sequence: Syntheticoligonucleotide
  source 1..20: mol_type = other RNA
atataagtggaggcgtcgcg

SEQ ID NO: 2480 - RNA, 20 nt, synthetic construct
  misc_feature 1..20: note = Description of Artificial Sequence: Syntheticoligonucleotide
  source 1..20: mol_type = other RNA
tggcctggaggctatccagc

SEQ ID NO: 2481 - RNA, 20 nt, synthetic construct
  misc_feature 1..20: note = Description of Artificial Sequence: Syntheticoligonucleotide
  source 1..20: mol_type = other RNA
aagttgacttactgaagaat

SEQ ID NO: 2482 - RNA, 20 nt, synthetic construct
  misc_feature 1..20: note = Description of Artificial Sequence: Syntheticoligonucleotide
  source 1..20: mol_type = other RNA
agcaaggactggtctttcta

SEQ ID NO: 2483 - RNA, 20 nt, synthetic construct
  misc_feature 1..20: note = Description of Artificial Sequence: Syntheticoligonucleotide
  source 1..20: mol_type = other RNA
agtgggggtgaattcagtgt

SEQ ID NO: 2484 - RNA, 20 nt, synthetic construct
  misc_feature 1..20: note = Description of Artificial Sequence: Syntheticoligonucleotide
  source 1..20: mol_type = other RNA
ggctgtgacaaagtcacatg

SEQ ID NO: 2485 - RNA, 20 nt, synthetic construct
  misc_feature 1..20: note = Description of Artificial Sequence: Syntheticoligonucleotide
  source 1..20: mol_type = other RNA
gtcacagcccaagatagtta

SEQ ID NO: 2486 - RNA, 20 nt, synthetic construct
  misc_feature 1..20: note = Description of Artificial Sequence: Syntheticoligonucleotide
  source 1..20: mol_type = other RNA
tcacagcccaagatagttaa

SEQ ID NO: 2487 - RNA, 40 nt, synthetic construct
  misc_feature 1..40: note = Description of Artificial Sequence: Syntheticoligonucleotide
  source 1..40: mol_type = other RNA
aggaatacatggtacacgttaggaatacatggtacacgtt

SEQ ID NO: 2488 - RNA, 37 nt, synthetic construct
  misc_feature 1..37: note = Description of Artificial Sequence: Syntheticoligonucleotide
  source 1..37: mol_type = other RNA
attgctccttacgaggagacagcaaggactggtcttt

SEQ ID NO: 2489 - protein, 8 aa, synthetic construct
  REGION 1..8: note = Description of Artificial Sequence: Syntheticpeptide
  MOD_RES 3: note = Any amino acid
  MOD_RES 4: note = W, F, or Y
  MOD_RES 5..6: note = Any amino acid
KRXXXXAF

SEQ ID NO: 2490 - protein, 6 aa, synthetic construct
  REGION 1..6: note = Description of Artificial Sequence: Syntheticpeptide
  MOD_RES 5: note = K or R
  MOD_RES 6: note = W, F, or Y
LGKRXX

1-276. (canceled)

277. A system comprising components, wherein the components comprise:
a) a polypeptide, or a nucleic acid encoding the polypeptide, wherein the polypeptide comprises an amino acid sequence that is at least 85% identical to a sequence selected from SEQ ID NOs: 29 and 32; and
b) an engineered guide nucleic acid, or a nucleic acid encoding the engineered guide nucleic acid, wherein the engineered guide nucleic acid comprises a first region comprising a nucleotide sequence that is complementary to a target sequence in a target nucleic acid and a second region that binds to the polypeptide, wherein the first region and the second region are heterologous to each other, and wherein the first region is located 3′ of the second region.

278. The system of claim 277, wherein the polypeptide comprises an amino acid sequence that is at least 90% identical to a sequence selected from SEQ ID NO: 29 and SEQ ID NO: 32.

279. The system of claim 277, wherein the polypeptide comprises an amino acid sequence that is at least 95% identical to a sequence selected from SEQ ID NO: 29 and SEQ ID NO: 32.

280. The system of claim 277, wherein the polypeptide comprises an amino acid sequence selected from SEQ ID NO: 29 and SEQ ID NO: 32.

281. The system of claim 277, wherein the polypeptide comprises an amino acid sequence that is at least 85% identical to the sequence of SEQ ID NO: 29, and wherein the second region of the engineered guide nucleic acid comprises an RNA sequence that is at least 85% identical to an RNA equivalent of SEQ ID NO: 68, wherein all thymines are uracils.

282. The system of claim 277, wherein the polypeptide comprises an amino acid sequence that is at least 85% identical to the sequence of SEQ ID NO: 32, wherein the second region of the engineered guide nucleic acid comprises an RNA sequence that is at least 85% identical to an RNA equivalent of SEQ ID NO: 71, wherein all thymines are uracils.

283. (canceled)

284. The system of claim 277, wherein the engineered guide nucleic acid comprises one or more phosphorothioate (PS) backbone modifications, 2′-fluoro (2′-F) sugar modifications, or 2′-O-Methyl (2′OMe) sugar modifications.

285. The system of claim 277, wherein the polypeptide is a nuclease that is capable of cleaving at least one strand of the target nucleic acid upon contact of a complex comprising the polypeptide and the engineered guide nucleic acid to the target nucleic acid.

286. The system of claim 277, wherein the polypeptide comprises a mutation that reduces an enzymatic activity of the polypeptide relative to a polypeptide that is 100% identical to the sequence selected from SEQ ID NO: 29 and SEQ ID NO: 32, and wherein the polypeptide is fused to a fusion partner.

287. The system of claim 277, wherein the components further comprise at least one of:
a) a detection reagent; or
b) an amplification reagent.

288. The system of claim 287, wherein:
a) the detection reagent is selected from: a reporter nucleic acid, a detection moiety, and an additional polypeptide, or is a combination thereof; and
b) the amplification reagent is selected from: a primer, a polymerase, a dNTP, and an rNTP, or is a combination thereof.

289. The system of claim 277, wherein the polypeptide comprises an amino acid sequence that is at least 85% identical to the sequence of SEQ ID NO: 32, and wherein the target sequence is adjacent to a protospacer adjacent motif (PAM) comprising a sequence of 5′-GTTN-3′.

290. The system of claim 277, wherein the nucleic acid encoding the polypeptide is a messenger RNA.

291. The system of claim 290, wherein the nucleic acid is an expression vector, and wherein the expression vector comprises or encodes the engineered guide nucleic acid.

292. The system of claim 277, wherein the nucleic acid encoding the polypeptide is an expression vector.

293. The system of claim 277, further comprising a lipid or lipid nanoparticle.

294. The system of claim 277, wherein the engineered guide nucleic acid comprises at least 10 contiguous nucleotides that are complementary to a eukaryotic sequence.

295. The system of claim 292, wherein the expression vector is an adeno-associated viral vector.

296. The system of claim 277, wherein the polypeptide is fused to a heterologous amino acid sequence.

297. The system of claim 277, wherein the polypeptide, or the nucleic acid encoding the polypeptide, and the engineered guide nucleic acid, or the nucleic acid encoding the engineered guide nucleic acid, are in a single composition.

298. A composition comprising:
a) a polypeptide, or a nucleic acid encoding the polypeptide, wherein the polypeptide comprises an amino acid sequence that is at least 90% identical to a sequence selected from SEQ ID NOS: 29 and 32; and
b) an engineered guide nucleic acid or a nucleic acid encoding the engineered guide nucleic acid, wherein the engineered guide nucleic acid comprises a first region comprising a nucleotide sequence that is complementary to a target sequence in a target nucleic acid and a second region that binds to the polypeptide, wherein the first region and the second region are heterologous to each other, and wherein the first region is located 3′ of the second region.

299. The composition of claim 298, wherein the polypeptide comprises an amino acid sequence that is at least 95% identical to a sequence selected from SEQ ID NO: 29 and SEQ ID NO: 32.

300. The composition of claim 298, wherein the polypeptide comprises an amino acid sequence that is at least 85% identical to the sequence of SEQ ID NO: 29, and wherein the second region of the engineered guide nucleic acid comprises an RNA sequence that is at least 85% identical to an RNA equivalent of SEQ ID NO: 68, wherein all thymines are uracils.

301. The composition of claim 298, wherein the polypeptide comprises an amino acid sequence that is at least 85% identical to the sequence of SEQ ID NO: 32, and wherein the second region of the engineered guide nucleic acid comprises an RNA sequence that is at least 85% identical to an RNA equivalent of SEQ ID NO: 71, wherein all thymines are uracils.

302. The composition of claim 298, wherein the polypeptide is fused to at least one nuclear localization signal.

303. The composition of claim 298, wherein the composition further comprises a fusion partner fused to the polypeptide or a nucleic acid encoding the fusion partner fused to the polypeptide.

304. The composition of claim 298, wherein the polypeptide is a nuclease that is capable of cleaving at least one strand of the target nucleic acid upon contact of the composition to the target nucleic acid.

305. The composition of claim 298, wherein the polypeptide comprises a RuvC domain that is capable of cleaving the target nucleic acid.

306. The composition of claim 298, wherein the composition further comprises a donor nucleic acid.
